(19) United States
(12) Patent Application Publication
(10) Pub. No.: US 2026/0152743 A1
(43) Pub. Date: Jun. 4, 2026

(54) APOLIPOPROTEIN C3 (APOC3) iRNA COMPOSITIONS AND METHODS OF USE THEREOF

(71) Applicant: Alnylam Pharmaceuticals, Inc., Cambridge, MA (US)

(72) Inventors: Frederic Tremblay, Boston, MA (US); Lucas D. BonDurant, Brookline, MA (US); James D. McIninch, Burlington, MA (US); Adam Castoreno, Framingham, MA (US); Mark K. Schlegel, Boston, MA (US); Charalambos Kaittanis, Cambridge, MA (US)

(21) Appl. No.: 19/411,462

(22) Filed: Dec. 8, 2025

Related U.S. Application Data
(63) Continuation of application No. 17/372,676, filed on Jul. 12, 2021, now Pat. No. 12,522,822.
Application No. 17/372,676 is a continuation of application No. 17/180,997, filed on Feb. 22, 2021, now Pat. No. 11,162,103.
Application No. 17/180,997 is a continuation of application No. PCT/US2021/017826, filed on Feb. 12, 2021.
(60) Provisional application No. 62/977,875, filed on Feb. 18, 2020.
(60) Provisional application No. 63/144,516, filed on Feb. 2, 2021.

(51) Int. Cl. C12N 15/113

(52) U.S. Cl. CPC C12N 15/113; C12N 2310/315; C12N 2310/321; C12N 2310/322; C12N 2310/351

(57) ABSTRACT

The present invention relates to RNAi agents, e.g., double stranded RNA (dsRNA) agents, targeting the apolipoprotein C3 gene (APOC3). The invention also relates to methods of using such RNAi agents to inhibit expression of an APOC3 gene and to methods of preventing and treating an APOC3-associated disorder, e.g., hypertriglyceridemia, non-alcoholic fatty liver disease, non-alcoholic steatohepatitis, polycystic ovary syndrome, kidney disease, obesity, type 2 diabetes mellitus (insulin resistance), hypertension, artherosclerosis and pancreatitis.

### RELATED APPLICATIONS

[0001] This application is a continuation of U.S. patent application Ser. No. 17/372,676, filed on Jul. 12, 2021, which is a continuation of U.S. patent application Ser. No. 17/180,997, filed on Feb. 22, 2021, now U.S. Pat. No. 11,162,103, issued on Nov. 2, 2021, which is a 35 § U.S.C. 111(a) continuation application which claims the benefit of priority to PCT/US2021/017826, filed on Feb. 12, 2021, which, in turn, claims the benefit of priority to U.S. Provisional Application No. 63/144,516, filed on Feb. 2, 2021, and U.S. Provisional Application No. 62/977,875, filed on Feb. 18, 2020. The entire contents of each of the foregoing applications are incorporated herein by reference.

### SEQUENCE LISTING

[0002] The instant application contains a Sequence Listing which has been submitted electronically in XML file format and is hereby incorporated by reference in its entirety. Said XML copy, created on Dec. 5, 2025, is named 121301_10405_SL.xml and is 6,637,023 bytes in size.

### BACKGROUND OF THE INVENTION

[0003] Apolipoprotein C3 (APOC3) is a very low density lipoprotein (VLDL) and an important regulator of lipoprotein metabolism. In humans, APOC3 is encoded by the APOC3 gene that is located in a gene cluster together with the APOA1 and APOA4 genes on the long arm of chromosome 11. APOC3 is expressed in the liver and, to a lesser extent, in the intestines, as a small 99-amino acid protein. Following removal of the 20-amino-acid signal peptide in the endoplasmic reticulum, a mature ApoC3 protein of 79 amino acids is formed, which may be present as a non-glycosylated or a glycosylated isoform.

[0004] The primary role of APOC3 is as a regulator of lipolysis through non-competitive inhibition of endothelial bound lipoprotein lipase (LPL). LPL hydrolyses triacylglycerols in triacylglycerol (triglyceride)-rich lipoproteins (TRLs), releasing fatty acids into the plasma and transforming large triacylglycerol-rich particles into smaller triacylglycerol-depleted remnant lipoproteins. Individuals lacking APOC3 have low TRL levels, coupled with highly efficient lipolysis of triacylglycerols. Furthermore, mice in which the APOC3 gene has been genetically deleted were shown to have low plasma triacylglycerol levels and efficient TRL catabolism. APOC3 also inhibits hepatic lipase (HL), a lipolytic enzyme with triacylglycerol lipase and phospholipase A1 activity that is synthesized in the liver. The inhibitory effect of APOC3 on HL further reduces the lipolysis and uptake of TRL remnants by the liver. APOC3 has also been shown to stimulate synthesis of very low density lipoproteins (VLDLs). It is believed that the underlying mechanisms associated with this effect of APOC3 may relate to the inhibition of proteasome mediated degradation of APOB, resulting in increased APOB synthesis and secretion, and increased synthesis of VLDL triacylglycerols. APOC3 may, therefore, play a key role in regulating VLDL output by the liver.

[0005] Cellular studies report that APOC3 may interfere with TRL and remnant binding to hepatic lipoprotein receptors. APOC3 can abolish APOB- and ApoE-mediated binding of lipoproteins to low density lipoprotein receptor (LDLR), either by masking or altering the conformation of APOB and APOE. The binding of chylomicrons and VLDL particles to the lipolysis-stimulated receptor (LSR) is also significantly inhibited by APOC3.

[0006] An increase in APOC3 levels induces the development of hypertriglyceridemia, or high (hyper-) blood levels (-emia) of triglycerides. Elevated levels of triglycerides are associated with a variety of diseases, including cardiovascular disease, atherosclerosis, non-alcoholic fatty liver disease, non-alcoholic steatohepatitis, polycystic ovary syndrome, kidney disease, obesity, type 2 diabetes mellitus (insulin resistance), hypertension and skin lesions (xanthomas). Very high triglyceride levels also increase the risk of acute pancreatitis. Therefore, regulating APOC3 metabolism is an important therapeutic approach to managing hypertriglyceridemia and the associated diseases.

[0007] Accordingly, there is a need in the art for regulators of APOC3 expression for treating apolipoprotein C3-associated disorders, such as hypertriglyceridemia.

### SUMMARY OF THE INVENTION

[0008] The present invention provides iRNA compositions which affect the RNA-induced silencing complex (RISC)-mediated cleavage of RNA transcripts of a gene encoding apolipoprotein C3 (APOC3). The apolipoprotein C3 (APOC3) may be within a cell, e.g., a cell within a subject, such as a human subject.

[0009] In an aspect, the invention provides a double stranded ribonucleic acid (dsRNA) agent for inhibiting expression of apolipoprotein C3 in a cell, wherein the dsRNA agent comprises a sense strand and an antisense strand forming a double stranded region, wherein the sense strand comprises at least 15 contiguous nucleotides differing by no more than 0, 1, 2, or 3 nucleotides from the nucleotide sequence of SEQ ID NO:1 and the antisense strand comprises at least 15 contiguous nucleotides differing by no more than 1, 2, or 3 nucleotides from the nucleotide sequence of SEQ ID NO:2. In one embodiment, the dsRNA agent comprises at least one thermally destabilizing nucleotide modification, e.g., an abasic modification; a mismatch with the opposing nucleotide in the duplex; and destabilizing sugar modification, a 2′-deoxy modification, an acyclic nucleotide, an unlocked nucleic acids (UNA), or a glycerol nucleic acid (GNA), e.g., the antisense strand comprises at least one thermally destabilizing nucleotide modification.

[0010] In another aspect, the present invention provides a double stranded ribonucleic acid (dsRNA) for inhibiting expression of apolipoprotein C3 in a cell, wherein said dsRNA comprises a sense strand and an antisense strand forming a double stranded region, wherein the antisense strand comprises a region of complementarity to an mRNA encoding apolipoprotein C3, and wherein the region of complementarity comprises at least 15 contiguous nucleotides differing by no more than 0, 1, 2, or 3 nucleotides from any one of the antisense nucleotide sequences in any one of Tables 2-5, 14, and 15.

[0011] In one aspect, the present invention provides a double stranded ribonucleic acid (dsRNA) for inhibiting expression of apolipoprotein C3 in a cell, wherein said dsRNA comprises a sense strand and an antisense strand forming a double stranded region, wherein the sense strand comprises at least 15 contiguous nucleotides differing by no more than 0, 1, 2, or 3 nucleotides from any one of the nucleotide sequence of nucleotides; 232-254; 233-255; 238-260; 239-261; 242-264; 243-265; 244-266; 264-286; 268-290; 426-448; 431-453; 432-454; 433-455; 435-457; 436-458; 499-521; 500-522; 503-525; 504-526; 507-529; 510-532; or 511-533 of the nucleotide sequence of SEQ ID NO:1, and the antisense strand comprises at least 19 contiguous nucleotides from the corresponding nucleotide sequence of SEQ ID NO:2.

[0012] In one embodiment, the antisense strand comprises at least 15 contiguous nucleotides differing by nor more than 0, 1, 2, or 3 nucleotides from any one of the antisense strand nucleotide sequences of a duplex selected from the group consisting of AD-959917.1; AD-959918.1; AD-960096.1; AD-960064.1; AD-959914.1; AD-959941.1; AD-960031.1; AD-960063.1; AD-960293.1; AD-960288.1; AD-960445.1; AD-960292.1; AD-960475.1; AD-960442.1; AD-960470.1; AD-960436.1; AD-960446.1; AD-960474.1; AD-960294.1; AD-960471.1; AD-960314.1; AD-960443.1; AD-960282.1; AD-960283.1; AD-80794.7; AD-960478.1; AD-960481.1; and AD-960482.1.

[0013] In another aspect, the present invention provides a double stranded ribonucleic acid (dsRNA) for inhibiting expression of apolipoprotein C3 in a cell, wherein the dsRNA comprises a sense strand and an antisense strand forming a double stranded region, wherein the sense strand comprises at least 15 contiguous nucleotides differing by no more than 0, 1, 2, or 3 nucleotides from any one of the nucleotide sequence of nucleotides 235-257; 238-260; 242-264; 243-265; 244-266; 426-448; 430-450; 431-453; 432-454; 433-455; 435-457; 436-458; 499-521; 503-525; and 504-526 of the nucleotide sequence of SEQ ID NO:1, and the antisense strand comprises at least 19 contiguous nucleotides from the corresponding nucleotide sequence of SEQ ID NO:2.

[0014] In one embodiment, the antisense strand comprises at least 15 contiguous nucleotides differing by not more than 0, 1, 2, or 3 nucleotides from any one of the antisense strand nucleotide sequences of a duplex selected from the group consisting of AD-959917.1; AD-960064.1; AD-960031.1; AD-960063.1; AD-960293.1; AD-960288.1; AD-960445.1; AD-960292.1; AD-960475.1; AD-960442.1; AD-960470.1; AD-960436.1; AD-960446.1; AD-960474.1; AD-960294.1; AD-960443.1; AD-80794.7; and AD-959910.1.

[0015] In another aspect, the present invention provides a double stranded ribonucleic acid (dsRNA) for inhibiting expression of apolipoprotein C3 in a cell, wherein the dsRNA comprises a sense strand and an antisense strand forming a double stranded region, wherein the sense strand comprises at least 15 contiguous nucleotides differing by no more than 0, 1, 2, or 3 nucleotides from any one of the nucleotide sequence of nucleotides 232-254; 239-261; 242-264; 244-266; 258-280; 264-286; 268-290, 429-451; 430-450; 430-452; 433-455; 434-456; 435-457; 500-522; 503-525; 507-529; and 510-532 of the nucleotide sequence of SEQ ID NO:1, and the antisense strand comprises at least 19 contiguous nucleotides from the corresponding nucleotide sequence of SEQ ID NO:2.

[0016] In one embodiment, the antisense strand comprises at least 15 contiguous nucleotides differing by not more than 0, 1, 2, or 3 nucleotides from any one of the antisense strand nucleotide sequences of a duplex selected from the group consisting of AD-80794.8; AD-959907.2; AD-959914.2; AD-959916.2; AD-959932.2; AD-960314.2; AD-959941.2; AD-960030.2; AD-960062.2; AD-960064.2; AD-960065.2; AD-960066.2; AD-960294.2; AD-960471.2; AD-960474.2; AD-960478.2; and AD-960481.2.

[0017] In one aspect, the present invention provides a double stranded ribonucleic acid (dsRNA) for inhibiting expression of apolipoprotein C3 in a cell, wherein the dsRNA comprises a sense strand and an antisense strand forming a double stranded region, wherein the sense strand comprises at least 15 contiguous nucleotides differing by no more than 0, 1, 2, or 3 nucleotides from any one of the nucleotide sequence of nucleotides 429-455 or 504-532 of the nucleotide sequence of SEQ ID NO:1, and the antisense strand comprises at least 19 contiguous nucleotides from the corresponding nucleotide sequence of SEQ ID NO:2.

[0018] In another aspect, the present invention provides a double stranded ribonucleic acid (dsRNA) for inhibiting expression of apolipoprotein C3 in a cell, wherein the dsRNA comprises a sense strand and an antisense strand forming a double stranded region, wherein the sense strand comprises at least 15 contiguous nucleotides differing by no more than 0, 1, 2, or 3 nucleotides from any one of the nucleotide sequence of nucleotides 429-451; 430-452; 431-451; 432-452; 433-455; 434-452; 504-526; and 506-526 of the nucleotide sequence of SEQ ID NO:1, and the antisense strand comprises at least 19 contiguous nucleotides from the corresponding nucleotide sequence of SEQ ID NO:2.

[0019] In one embodiment, the antisense strand comprises at least 15 contiguous nucleotides differing by not more than 0, 1, 2, or 3 nucleotides from any one of the antisense strand nucleotide sequences of a duplex selected from the group consisting of AD-960030; AD-960064; AD-1143243; AD-1143245; AD-1143247; AD-1143249; AD-1143256; AD-1143260; AD-1143278; AD-1143287; AD-1143295; AD-1143299; AD-1143302; and AD-1143305.

[0020] In one embodiment, the antisense strand comprises at least 15 contiguous nucleotides differing by not more than 0, 1, 2, or 3 nucleotides from the antisense strand nucleotide sequence of duplex AD-1143278 or AD-960064.

[0021] In one embodiment, the antisense strand comprises at least 15 contiguous nucleotides differing by not more than 0, 1, 2, or 3 nucleotides from the nucleotide sequence of nucleotides 429-456 of SEQ ID NO:1.

[0022] In one embodiment, the sense strand comprises at least 15 contiguous nucleotides differing by not more than 0, 1, 2, or 3 nucleotides from the nucleotide sequence of nucleotides 433-455 of SEQ ID NO:1.

[0023] In one embodiment, the sense strand comprises at least 15 contiguous nucleotides differing by not more than 0, 1, 2, or 3 nucleotides from the nucleotide sequence of nucleotides 434-452 of SEQ ID NO:1.

[0024] In one embodiment, the antisense strand comprises at least 15 contiguous nucleotides differing by not more than 0, 1, 2, or 3 nucleotides from the antisense strand nucleotide sequence of duplex AD-1143243.

[0025] In one embodiment, the dsRNA agent comprises at least one modified nucleotide.

[0026] In one embodiment, substantially all of the nucleotides of the sense strand; substantially all of the nucleotides of the antisense strand comprise a modification; or substantially all of the nucleotides of the sense strand and substantially all of the nucleotides of the antisense strand comprise a modification.

[0027] In one embodiment, all of the nucleotides of the sense strand comprise a modification; all of the nucleotides of the antisense strand comprise a modification; or all of the nucleotides of the sense strand and all of the nucleotides of the antisense strand comprise a modification.

[0028] In one embodiment, at least one of the modified nucleotides is selected from the group consisting of a deoxy-nucleotide, a 3′-terminal deoxy-thymine (dT) nucleotide, a 2′-O-methyl modified nucleotide, a 2′-fluoro modified nucleotide, a 2′-deoxy-modified nucleotide, a locked nucleotide, an unlocked nucleotide, a conformationally restricted nucleotide, a constrained ethyl nucleotide, an abasic nucleotide, a 2′-amino-modified nucleotide, a 2′-O-allyl-modified nucleotide, 2′-C-alkyl-modified nucleotide, 2′-hydroxyl-modified nucleotide, a 2′-methoxyethyl modified nucleotide, a 2′-O-alkyl-modified nucleotide, a morpholino nucleotide, a phosphoramidate, a non-natural base comprising nucleotide, a tetrahydropyran modified nucleotide, a 1,5-anhydrohexitol modified nucleotide, a cyclohexenyl modified nucleotide, a nucleotide comprising a phosphorothioate group, a nucleotide comprising a methylphosphonate group, a nucleotide comprising a 5′-phosphate, a nucleotide comprising a 5′-phosphate mimic, a thermally destabilizing nucleotide, a glycol modified nucleotide (GNA), and a 2-O—(N-methylacetamide) modified nucleotide; and combinations thereof.

[0029] In one embodiment, the modifications on the nucleotides are selected from the group consisting of LNA, HNA, CeNA, 2′-methoxyethyl, 2′-O-alkyl, 2′-O-allyl, 2′-C-allyl, 2′-fluoro, 2′-deoxy, 2′-hydroxyl, and glycol; and combinations thereof.

[0030] In one embodiment, at least one of the modified nucleotides is selected from the group consisting of a deoxy-nucleotide, a 2′-O-methyl modified nucleotide, a 2′-fluoro modified nucleotide, a 2′-deoxy-modified nucleotide, a glycol modified nucleotide (GNA), e.g., Ggn, Cgn, Tgn, or Agn, and, a vinyl-phosphonate nucleotide; and combinations thereof.

[0031] In another embodiment, at least one of the modifications on the nucleotides is a thermally destabilizing nucleotide modification.

[0032] In one embodiment, the thermally destabilizing nucleotide modification is selected from the group consisting of an abasic modification; a mismatch with the opposing nucleotide in the duplex; and destabilizing sugar modification, a 2′-deoxy modification, an acyclic nucleotide, an unlocked nucleic acids (UNA), and a glycerol nucleic acid (GNA).

[0033] The double stranded region may be 19-30 nucleotide pairs in length; 19-25 nucleotide pairs in length; 19-23 nucleotide pairs in length; 23-27 nucleotide pairs in length; or 21-23 nucleotide pairs in length.

[0034] In one embodiment, each strand is independently no more than 30 nucleotides in length.

[0035] In one embodiment, the sense strand is 21 nucleotides in length and the antisense strand is 23 nucleotides in length.

[0036] The region of complementarity may be at least 17 nucleotides in length; between 19 and 23 nucleotides in length; or 19 nucleotides in length.

[0037] In one embodiment, at least one strand comprises a 3′ overhang of at least 1 nucleotide. In another embodiment, at least one strand comprises a 3′ overhang of at least 2 nucleotides.

[0038] In one embodiment, the dsRNA agent further comprises a ligand.

[0039] In one embodiment, the ligand is conjugated to the 3′ end of the sense strand of the dsRNA agent.

[0040] In one embodiment, the ligand is an N-acetylgalactosamine (GalNAc) derivative.

[0041] In one embodiment, the ligand is one or more GalNAc derivatives attached through a monovalent, bivalent, or trivalent branched linker.

[0042] In one embodiment, the ligand is

[chemical structure]

[0043] In one embodiment, the dsRNA agent is conjugated to the ligand as shown in the following schematic

[chemical structure]

and, wherein X is O or S.

[0044] In one embodiment, the X is O.

[0045] In one embodiment, the dsRNA agent further comprises at least one phosphorothioate or methylphosphonate internucleotide linkage.

[0046] In one embodiment, the phosphorothioate or methylphosphonate internucleotide linkage is at the 3′-terminus of one strand, e.g., the antisense strand or the sense strand.

[0047] In another embodiment, the phosphorothioate or methylphosphonate internucleotide linkage is at the 5′-terminus of one strand, e.g., the antisense strand or the sense strand.

[0048] In one embodiment, the phosphorothioate or methylphosphonate internucleotide linkage is at the both the 5′- and 3′-terminus of one strand. In one embodiment, the strand is the antisense strand.

[0049] In one embodiment, the base pair at the 1 position of the 5′-end of the antisense strand of the duplex is an AU base pair.

[0050] In one aspect, the present invention provides a double stranded ribonucleic acid (dsRNA) for inhibiting expression of apolipoprotein C3 in a cell, wherein the dsRNA comprises a sense strand and an antisense strand forming a double stranded region, wherein the sense strand comprises at least 15, contiguous nucleotides differing by no more than 0, 1, 2, or 3 nucleotides from the nucleotide sequence of nucleotides 434-452 of the nucleotide sequence of SEQ ID NO:1, and the antisense strand comprises at least 19 contiguous nucleotides from the corresponding nucleotide sequence of SEQ ID NO:2, wherein substantially all of the nucleotides of the sense strand and substantially all of the nucleotides of the antisense strand comprise a modification selected from the group consisting of a 2′-O-methyl modification, a 2′-fluoro modification, and a deoxy-modification, wherein both the sense strand and the antisense strand independently further comprise at least one phosphorothioate or methylphosphonate internucleotide linkage, and wherein at least one strand is conjugated to a ligand.

[0051] In one embodiment, all of the nucleotides of the sense strand and all of the nucleotides of the antisense strand comprise a modification selected from the group consisting of a 2′-O-methyl modification, a 2′-fluoro modification, and a 2′-deoxy-modification.

[0052] In one embodiment, the sense strand comprises 2-6, e.g., 2, 3, 4, 5, or 6, 2′-fluoro modified nucleotides. In another embodiment, the sense strand comprises no more than 6, e.g., 0, 1, 2, 3, 4, 5, or 6, 2′-fluoro modified nucleotides.

[0053] In one embodiment, the sense strand comprises no more than 2, e.g., 0, 1, or 2, 2′-deoxy-modified nucleotides.

[0054] In one embodiment, the antisense strand comprises no more than 4, e.g., 0, 1, 2, 3, or 4, 2′-fluoro modified nucleotides.

[0055] In one embodiment, the antisense strand comprises no more than 5, e.g., 0, 1, 2, 3, 4, or 5, 2′-deoxy-modified nucleotides. In another embodiment, the antisense strand comprises 1-5, e.g., 1, 2, 3, 4, or 5, deoxy-nucleotides.

[0056] In one embodiment, the sense strand comprises 4 2′-fluoro modified nucleotides, e.g., nucleotides 7 and 9-11, counting from the 5′-end, and the antisense strand comprises 2 2′-fluoro modified nucleotides, e.g., nucleotides 14 and 16, counting from the 5′-end, and 3 2′-deoxy-modified nucleotides, e.g., nucleotides 2, 5, and 7, counting from the 5′-end.

[0057] In one embodiment, the phosphorothioate or methylphosphonate internucleotide linkage is at the 3′-terminus of one strand, e.g., the antisense strand or the sense strand.

[0058] In another embodiment, the phosphorothioate or methylphosphonate internucleotide linkage is at the 5′-terminus of one strand, e.g., the antisense strand or the sense strand.

[0059] In one embodiment, the phosphorothioate or methylphosphonate internucleotide linkage is at both the 5′- and 3′-terminus of one strand. In one embodiment, the strand is the antisense strand.

[0060] In one embodiment, the sense strand comprises two phosphorothioate or methylphosphonate internucleotide linkages at the 5′-terminus.

[0061] In one embodiment, the antisense strand comprises two phosphorothioate or methylphosphonate internucleotide linkages at the 5′-terminus.

[0062] In another embodiment, the antisense strand comprises two phosphorothioate or methylphosphonate internucleotide linkages at both the 5′- and 3′-terminus.

[0063] In one embodiment, the sense strand comprises two phosphorothioate or methylphosphonate internucleotide linkages at the 5′-terminus and the antisense strand comprises two phosphorothioate or methylphosphonate internucleotide linkages at both the 5′- and 3′-terminus.

[0064] In one embodiment, the ligand is conjugated to the sense strand.

[0065] In one embodiment the ligand is conjugated to the 3′-end of the sense strand.

[0066] In one embodiment, the ligand is n N-acetylgalactosamine (GalNAc) derivative.

[0067] In one embodiment, the ligand is one or more GalNAc derivatives attached through a monovalent, bivalent, or trivalent branched linker.

[0068] In one embodiment, the ligand is

[chemical structure]

[0069] In one embodiment, the dsRNA agent is conjugated to the ligand as shown in the following schematic

[chemical structure]

and, wherein X is O or S.

[0070] In one embodiment, the X is O.

[0071] In one embodiment, the sense strand comprises at least 17, contiguous nucleotides differing by no more than 0, 1, 2, or 3 nucleotides from the nucleotide sequence of 5′-CUUAAAAGGGACAGUAUUCUA-3′(SEQ ID NO: 13).

[0072] In one embodiment, the sense strand comprises at least 19, contiguous nucleotides differing by no more than 0, 1, 2, or 3 nucleotides from the nucleotide sequence of 5′-CUUAAAAGGGACAGUAUUCUA-3′(SEQ ID NO: 13).

[0073] In one embodiment, the sense strand comprises the nucleotide sequence of 5′-CUUAAAAGGGACAGUAUUCUA-3′(SEQ ID NO: 13).

[0074] In one embodiment, the antisense strand comprises at least 17, contiguous nucleotides differing by no more than 0, 1, 2, or 3 nucleotides from the nucleotide sequence of 5′-UAGAAUACUGUCCCUUUUAAGCC-3′ (SEQ ID NO: 14).

[0075] In one embodiment, the antisense strand comprises at least 19, contiguous nucleotides differing by no more than 0, 1, 2, or 3 nucleotides from the nucleotide sequence of 5′-UAGAAUACUGUCCCUUUUAAGCC-3′ (SEQ ID NO: 14).

[0076] In one embodiment, the antisense strand comprises at least 21, contiguous nucleotides differing by no more than 0, 1, 2, or 3 nucleotides from the nucleotide sequence of 5′-UAGAAUACUGUCCCUUUUAAGCC-3′(SEQ ID NO: 14).

[0077] In one embodiment, the antisense strand comprises the nucleotide sequence of 5′-UAGAAUACUGUCCCUUUUAAGCC-3′(SEQ ID NO: 14).

[0078] In one embodiment, the sense strand comprises the nucleotide sequence of 5′-CUUAAAAGGGACAGUAUUCUA-3′ (SEQ ID NO: 13) and the antisense strand comprises the nucleotide sequence of 5′-UAGAAUACUGUCCCUUUUAAGCC-3′(SEQ ID NO: 14).

[0079] In one embodiment, the sense strand differs by no more than 3, e.g., 0, 1, 2, or 3, modified nucleotides from the nucleotide sequence of 5′-csusuaaaAfgGfGfAfcaguauucua-3′ (SEQ ID NO: 15) wherein a, g, c and u are 2′-O-methyl (2′-OMe) A, G, C, and U respectively; Af, Gf, Cf and Uf are 2′-fluoro A, G, C and U respectively; and s is a phosphorothioate linkage.

[0080] In one embodiment, the antisense strand differs by no more than 3, e.g., 0, 1, 2, or 3, modified nucleotides from the nucleotide sequence of 5′-usdAsgadAudAcuguccCfuUfuuaagscsc-3′ (SEQ ID NO: 16), wherein a, g, c and u are 2′-O-methyl (2′-OMe) A, G, C, and U respectively; Af, Gf, Cf and Uf are 2′-fluoro A, G, C and U respectively; dA is a 2′-deoxyadenosine-3′-phosphate nucleotide; and s is a phosphorothioate linkage.

[0081] In one embodiment, the sense strand comprises the nucleotide sequence of 5′-csusuaaaAfgGfGfAfcaguauucua-3′ (SEQ ID NO: 15) and the antisense strand comprises the nucleotide sequence of 5′-usdAsgadAudAcuguccCfuUfuuaagscsc-3′ (SEQ ID NO: 16), wherein a, g, c and u are 2′-O-methyl (2′-OMe) A, G, C, and U respectively; Af, Gf, Cf and Uf are 2′-fluoro A, G, C and U respectively; dA is a 2′-deoxyadenosine-3′-phosphate nucleotide; and s is a phosphorothioate linkage.

[0082] In one embodiment, the sense strand comprises the nucleotide sequence of 5′-csusuaaaAfgGfGfAfcaguauucuaL96-3′ (SEQ ID NO: 17) and the antisense strand comprises the nucleotide sequence of 5′-usdAsgadAudAcuguccCfuUfuuaagscsc-3′ (SEQ ID NO: 16), wherein a, g, c and u are 2′-O-methyl (2′-OMe) A, G, C, and U respectively; Af, Gf, Cf and Uf are 2′-fluoro A, G, C and U respectively; dA is a 2′-deoxyadenosine-3′-phosphate nucleotide; s is a phosphorothioate linkage, and L96 is N-[tris(GalNAc-alkyl)-amidodecanoyl)]-4-hydroxyprolinol.

[0083] In one embodiment, the sense strand comprises the nucleotide sequence of 5′-csusuaaaAfgGfGfAfcaguauucua-3′ (SEQ ID NO: 15) and the antisense strand comprises the nucleotide sequence of 5′-usdAsgadAudAcuguccCfuUfuuaagscsc-3′ (SEQ ID NO: 16, wherein a, g, c and u are 2′-O-methyl (2′-OMe) A, G, C, and U respectively; Af, Gf, Cf and Uf are 2′-fluoro A, G, C and U respectively; dA is a 2′-deoxyadenosine-3′-phosphate nucleotide; and s is a phosphorothioate linkage, wherein the 3′-end of the sense strand is conjugated to the ligand as shown in the following schematic:

[chemical structure]

and, wherein X is O.

[0084] In one embodiment, the sense strand comprises at least 17, contiguous nucleotides differing by no more than 0, 1, 2, or 3 nucleotides from the nucleotide sequence of 5′-CUUAAAAGGGACAGUAUUCUU-3′(SEQ ID NO: 48).

[0085] In one embodiment, the sense strand comprises at least 19, contiguous nucleotides differing by no more than 0, 1, 2, or 3 nucleotides from the nucleotide sequence of 5′-CUUAAAAGGGACAGUAUUCUU-3′(SEQ ID NO: 48).

[0086] In one embodiment, the sense strand comprises the nucleotide sequence of 5′-CUUAAAAGGGACAGUAUUCUU-3′(SEQ ID NO: 48).

[0087] In one embodiment, the antisense strand comprises at least 17, contiguous nucleotides differing by no more than 0, 1, 2, or 3 nucleotides from the nucleotide sequence of 5′-AAGAAUACUGUCCCUUUUAAGCC-3′ (SEQ ID NO: 315).

[0088] In one embodiment, the antisense strand comprises at least 19, contiguous nucleotides differing by no more than 0, 1, 2, or 3 nucleotides from the nucleotide sequence of 5′-AAGAAUACUGUCCCUUUUAAGCC-3′ (SEQ ID NO: 315).

[0089] In one embodiment, the antisense strand comprises at least 21, contiguous nucleotides differing by no more than 0, 1, 2, or 3 nucleotides from the nucleotide sequence of 5′-AAGAAUACUGUCCCUUUUAAGCC-3′ (SEQ ID NO: 315).

[0090] In one embodiment, the antisense strand comprises the nucleotide sequence of 5′-AAGAAUACUGUCCCUUUUAAGCC-3′ (SEQ ID NO: 315).

[0091] In one embodiment, the sense strand comprises the nucleotide sequence of 5′-CUUAAAAGGGACAGUAUUCUU-3′(SEQ ID NO: 48) and the antisense strand comprises the nucleotide sequence of 5′-AAGAAUACUGUCCCUUUUAAGCC-3′ (SEQ ID NO: 315).

[0092] In one embodiment, the sense strand differs by no more than 3, e.g., 0, 1, 2, or 3, modified nucleotides from the nucleotide sequence of 5′-csusuaaaAfgGfGfAfcaguauucuu-3′ (SEQ ID NO: 377) wherein a, g, c and u are 2′-O-methyl (2′-OMe) A, G, C, and U respectively; Af, Gf, Cf and Uf are 2′-fluoro A, G, C and U respectively; and s is a phosphorothioate linkage.

[0093] In one embodiment, the antisense strand differs by no more than 3, e.g., 0, 1, 2, or 3, modified nucleotides from the nucleotide sequence of 5′-asdAsgadAudAcuguccCfuUfuuaagscsc-3′ (SEQ ID NO: 866), wherein a, g, c and u are 2′-O-methyl (2′-OMe) A, G, C, and U respectively; Af, Gf, Cf and Uf are 2′-fluoro A, G, C and U respectively; dA is a 2′-deoxyadenosine-3′-phosphate nucleotide; and s is a phosphorothioate linkage.

[0094] In one embodiment, the sense strand comprises the nucleotide sequence of 5′-csusuaaaAfgGfGfAfcaguauucuu-3′ (SEQ ID NO: 377) and the antisense strand comprises the nucleotide sequence of 5′-asdAsgadAudAcuguccCfuUfuuaagscsc-3′ (SEQ ID NO: 866), wherein a, g, c and u are 2′-O-methyl (2′-OMe) A, G, C, and U respectively; Af, Gf, Cf and Uf are 2′-fluoro A, G, C and U respectively; dA is a 2′-deoxyadenosine-3′-phosphate nucleotide; and s is a phosphorothioate linkage.

[0095] In one embodiment, the sense strand comprises the nucleotide sequence of 5′-csusuaaaAfgGfGfAfcaguauucuuL96-3′ (SEQ ID NO: 377) and the antisense strand comprises the nucleotide sequence of 5′-asdAsgadAudAcuguccCfuUfuuaagscsc-3′ (SEQ ID NO: 866), wherein a, g, c and u are 2′-O-methyl (2′-OMe) A, G, C, and U respectively; Af, Gf, Cf and Uf are 2′-fluoro A, G, C and U respectively; dA is a 2′-deoxyadenosine-3′-phosphate nucleotide; s is a phosphorothioate linkage, and L96 is N-[tris(GalNAc-alkyl)-amidodecanoyl)]-4-hydroxyprolinol.

[0096] In one embodiment, the sense strand comprises the nucleotide sequence of 5′-csusuaaaAfgGfGfAfcaguauucuu-3′ (SEQ ID NO: 377) and the antisense strand comprises the nucleotide sequence of 5′-asdAsgadAudAcuguccCfuUfuuaagscsc-3′ (SEQ ID NO: 866), wherein a, g, c and u are 2′-O-methyl (2′-OMe) A, G, C, and U respectively; Af, Gf, Cf and Uf are 2′-fluoro A, G, C and U respectively; dA is a 2′-deoxyadenosine-3′-phosphate nucleotide; and s is a phosphorothioate linkage, wherein the 3′-end of the sense strand is conjugated to the ligand as shown in the following schematic:

[chemical structure]

and, wherein X is O.

[0097] In one embodiment, the sense strand comprises at least 17, contiguous nucleotides differing by no more than 0, 1, 2, or 3 nucleotides from the nucleotide sequence of 5′-AAAAGGGACAGUAUUCUCAGU-3′(SEQ ID NO: 30).

[0098] In one embodiment, the sense strand comprises at least 19, contiguous nucleotides differing by no more than 0, 1, 2, or 3 nucleotides from the nucleotide sequence of 5′-AAAAGGGACAGUAUUCUCAGU-3′(SEQ ID NO: 30).

[0099] In one embodiment, the sense strand comprises the nucleotide sequence of 5′-AAAAGGGACAGUAUUCUCAGU-3′(SEQ ID NO: 30).

[0100] In one embodiment, the antisense strand comprises at least 17, contiguous nucleotides differing by no more than 0, 1, 2, or 3 nucleotides from the nucleotide sequence of 5′-ACUGAGAAUACUGUCCCUUUUAA-3′ (SEQ ID NO: 31).

[0101] In one embodiment, the antisense strand comprises at least 19, contiguous nucleotides differing by no more than 0, 1, 2, or 3 nucleotides from the nucleotide sequence of 5′-ACUGAGAAUACUGUCCCUUUUAA-3′ (SEQ ID NO: 31).

[0102] In one embodiment, the antisense strand comprises at least 21, contiguous nucleotides differing by no more than 0, 1, 2, or 3 nucleotides from the nucleotide sequence of 5′-ACUGAGAAUACUGUCCCUUUUAA-3′ (SEQ ID NO: 31).

[0103] In one embodiment, the antisense strand comprises the nucleotide sequence of 5′-ACUGAGAAUACUGUCCCUUUUAA-3′ (SEQ ID NO: 31).

[0104] In one embodiment, the sense strand comprises the nucleotide sequence of 5′-AAAAGGGACAGUAUUCUCAGU-3′(SEQ ID NO: 30) and the antisense strand comprises the nucleotide sequence of 5′-ACUGAGAAUACUGUCCCUUUUAA-3′ (SEQ ID NO: 31).

[0105] In one embodiment, the sense strand differs by no more than 3, e.g., 0, 1, 2, or 3, modified nucleotides from the nucleotide sequence of 5′-asasaaggGfaCfAfGfuauucucagu-3′ (SEQ ID NO: 350) wherein a, g, c and u are 2′-O-methyl (2′-OMe) A, G, C, and U respectively; Af, Gf, Cf and Uf are 2′-fluoro A, G, C and U respectively; and s is a phosphorothioate linkage.

[0106] In one embodiment, the antisense strand differs by no more than 3, e.g., 0, 1, 2, or 3, modified nucleotides from the nucleotide sequence of 5′-asCfsugaGfaAfUfacugUfcCfcuuuusasa-3′ (SEQ ID NO: 351), wherein a, g, c and u are 2′-O-methyl (2′-OMe) A, G, C, and U respectively; Af, Gf, Cf and Uf are 2′-fluoro A, G, C and U respectively; and s is a phosphorothioate linkage.

[0107] In one embodiment, the sense strand comprises the nucleotide sequence of 5′-asasaaggGfaCfAfGfuauucucagu-3′ (SEQ ID NO: 350) and the antisense strand comprises the nucleotide sequence of 5′-asCfsugaGfaAfUfacugUfcCfcuuuusasa-3′ (SEQ ID NO: 351), wherein a, g, c and u are 2′-O-methyl (2′-OMe) A, G, C, and U respectively; Af, Gf, Cf and Uf are 2′-fluoro A, G, C and U respectively; and s is a phosphorothioate linkage.

[0108] In one embodiment, the sense strand comprises the nucleotide sequence of 5′-asasaaggGfaCfAfGfuauucucaguL96-3′ (SEQ ID NO: 350) and the antisense strand comprises the nucleotide sequence of 5′-asCfsugaGfaAfUfacugUfcCfcuuuusasa-3′ (SEQ ID NO: 351), wherein a, g, c and u are 2′-O-methyl (2′-OMe) A, G, C, and U respectively; Af, Gf, Cf and Uf are 2′-fluoro A, G, C and U respectively; s is a phosphorothioate linkage, and L96 is N-[tris(GalNAc-alkyl)-amidodecanoyl)]-4-hydroxyprolinol.

[0109] In one embodiment, the sense strand comprises the nucleotide sequence of 5′-asasaaggGfaCfAfGfuauucucagu-3′ (SEQ ID NO: 350) and the antisense strand comprises the nucleotide sequence of 5′-asCfsugaGfaAfUfacugUfcCfcuuuusasa-3′ (SEQ ID NO: 351), wherein a, g, c and u are 2′-O-methyl (2′-OMe) A, G, C, and U respectively; Af, Gf, Cf and Uf are 2′-fluoro A, G, C and U respectively; and s is a phosphorothioate linkage, wherein the 3′-end of the sense strand is conjugated to the ligand as shown in the following schematic:

[chemical structure]

and, wherein X is O.

[0110] In one aspect, the present invention provides a double stranded ribonucleic acid (dsRNA) for inhibiting expression of apolipoprotein C3 in a cell, wherein the dsRNA comprises a sense strand and an antisense strand forming a double stranded region, wherein the sense strand comprises at least 15, contiguous nucleotides differing by no more than 0, 1, 2, or 3 nucleotides from the nucleotide sequence of nucleotides 429-456 of the nucleotide sequence of SEQ ID NO:1, and the antisense strand comprises at least 19 contiguous nucleotides from the corresponding nucleotide sequence of SEQ ID NO:2, wherein substantially all of the nucleotides of the sense strand and substantially all of the nucleotides of the antisense strand comprise a modification selected from the group consisting of a 2′-O-methyl modification, a 2′-fluoro modification, and a deoxy-modification, wherein both the sense strand and the antisense strand independently further comprise at least one phosphorothioate or methylphosphonate internucleotide linkage, and wherein at least one strand is conjugated to a ligand.

[0111] In one embodiment, the sense strand comprises 2-6 2′-fluoro modified nucleotides.

[0112] In one embodiment, the antisense strand comprises no more than 4 2′-fluoro modified nucleotides.

[0113] In one embodiment, the antisense strand comprises 1-5 deoxy-modified nucleotides.

[0114] In one aspect, the present invention provides a double stranded ribonucleic acid (dsRNA) agent for inhibiting expression of apolipoprotein C3 in a cell, wherein the dsRNA agent comprises a sense strand and an antisense strand forming a double stranded region, wherein the sense strand comprises at least 15 contiguous nucleotides differing by no more than 3 nucleotides from the nucleotide sequence of nucleotides 429-456 of the nucleotide sequence of SEQ ID NO:1, and the antisense strand comprises at least 19 contiguous nucleotides from the corresponding nucleotide sequence of SEQ ID NO:2, wherein all of the nucleotides of the sense strand and all of the nucleotides of the antisense strand comprise a modification selected from the group consisting of a 2′-O-methyl modification, a 2′-fluoro modification, and a deoxy-modification, wherein both the sense strand and the antisense strand independently further comprise at least one phosphorothioate or methylphosphonate internucleotide linkage, and wherein at least one strand is conjugated to a ligand.

[0115] In one embodiment, the sense strand comprises 2-6 2′-fluoro modified nucleotides.

[0116] In one embodiment, the sense strand comprises 4 2′-fluoro modified nucleotides.

[0117] In one embodiment, the antisense strand comprises 2-4 2′-fluoro modified nucleotides.

[0118] In one embodiment, the antisense strand comprises 2 2′-fluoro modified nucleotides.

[0119] In one embodiment, the antisense strand comprises 1-5 2′-deoxy-modified nucleotides.

[0120] In one embodiment, the antisense strand comprises 3 2′-deoxy-modified nucleotides.

[0121] In one embodiment, the sense strand comprises 4 2′-fluoro modified nucleotides at nucleotides 7 and 9-11, counting from the 5′-end, and the antisense strand comprises 2 2′-fluoro modified nucleotides at nucleotides 14 and 16, counting from the 5′-end, and 3 2′-deoxy-modified nucleotides at nucleotides 2, 5, and 7, counting from the 5′-end.

[0122] In one embodiment, the sense strand comprises two phosphorothioate or methylphosphonate internucleotide linkages at the 5′-terminus.

[0123] In one embodiment, the antisense strand comprises two phosphorothioate or methylphosphonate internucleotide linkages at both the 5′- and the 3′-terminus.

[0124] In one embodiment, the sense strand comprises two phosphorothioate or methylphosphonate internucleotide linkages at the 5′-terminus and the antisense strand comprises two phosphorothioate or methylphosphonate internucleotide linkages at both the 5′- and the 3′-terminus.

[0125] In one embodiment, the ligand is conjugated to the 3′-end of the sense strand.

[0126] In one embodiment, the ligand is an N-acetylgalactosamine (GalNAc) derivative.

[0127] In one embodiment, the ligand is one or more GalNAc derivatives attached through a monovalent, bivalent, or trivalent branched linker.

[0128] In one embodiment, the ligand is

[chemical structure]

[0129] In one embodiment, the dsRNA agent is conjugated to the ligand as shown in the following schematic

[chemical structure]

and, wherein X is O.

[0130] In one aspect, the present invention provides a double stranded ribonucleic acid (dsRNA) agent for inhibiting expression of apolipoprotein C3 in a cell, wherein the dsRNA agent comprises a sense strand and an antisense strand forming a double stranded region, wherein the sense strand differs by no more than 3 modified nucleotides from the nucleotide sequence of 5′-csusuaaaAfgGfGfAfcaguauucua-3′ (SEQ ID NO:15) and wherein the antisense strand differs by no more than 3 modified nucleotides from the nucleotide sequence of 5′-usdAsgadAudAcuguccCfuUfuuaagscsc-3′ (SEQ ID NO:16), wherein a, g, c and u are 2′-O-methyl (2′-OMe) A, G, C, and U respectively; Af, Gf, Cf and Uf are 2′-fluoro A, G, C and U respectively; dA is a 2′-deoxyadenosine-3′-phosphate nucleotide; and s is a phosphorothioate linkage.

[0131] In one embodiment, the sense strand differs by no more than 2 modified nucleotides from the nucleotide sequence of 5′-csusuaaaAfgGfGfAfcaguauucua-3′ (SEQ ID NO:15) and wherein the antisense strand differs by no more than 2 modified nucleotides from the nucleotide sequence of 5′-usdAsgadAudAcuguccCfuUfuuaagscsc-3′ (SEQ ID NO:16).

[0132] In one embodiment, the sense strand differs by no more than 1 modified nucleotide from the nucleotide sequence of 5′-csusuaaaAfgGfGfAfcaguauucua-3′ (SEQ ID NO:15) and wherein the antisense strand differs by no more than 1 modified nucleotides from the nucleotide sequence of 5′-usdAsgadAudAcuguccCfuUfuuaagscsc-3′ (SEQ ID NO:16).

[0133] In one embodiment, the dsRNA agent is conjugated to the ligand as shown in the following schematic

[chemical structure]

and, wherein X is O.

[0134] In one aspect, the present invention provides a double stranded ribonucleic acid (dsRNA) agent for inhibiting expression of apolipoprotein C3 in a cell, wherein the dsRNA agent comprises a sense strand and an antisense strand forming a double stranded region, wherein the sense strand comprises the nucleotide sequence of 5′-csusuaaaAfgGfGfAfcaguauucua-3′ (SEQ ID NO:15) and the antisense strand comprises the nucleotide sequence of 5′-usdAsgadAudAcuguccCfuUfuuaagscsc-3′ *SEQ ID NO:16), wherein a, g, c and u are 2′-O-methyl (2′-OMe) A, G, C, and U respectively; Af, Gf, Cf and Uf are 2′-fluoro A, G, C and U respectively; dA is a 2′-deoxyadenosine-3′-phosphate nucleotide; and s is a phosphorothioate linkage.

[0135] In one aspect, the present invention provides a double stranded ribonucleic acid (dsRNA) agent for inhibiting expression of apolipoprotein C3 in a cell, wherein the dsRNA agent comprises a sense strand and an antisense strand forming a double stranded region, wherein the sense strand comprises the nucleotide sequence of 5′-csusuaaaAfgGfGfAfcaguauucuaL96-3′ (SEQ ID NO:17) and the antisense strand comprises the nucleotide sequence of 5′-usdAsgadAudAcuguccCfuUfuuaagscsc-3′ (SEQ ID NO:16), wherein a, g, c and u are 2′-O-methyl (2′-OMe) A, G, C, and U respectively; Af, Gf, Cf and Uf are 2′-fluoro A, G, C and U respectively; dA is a 2′-deoxyadenosine-3′-phosphate nucleotide; s is a phosphorothioate linkage, and L96 is N-[tris(GalNAc-alkyl)-amidodecanoyl)]-4-hydroxyprolinol.

[0136] In another aspect, the present invention provides a double stranded ribonucleic acid (dsRNA) agent for inhibiting expression of apolipoprotein C3 in a cell, wherein the dsRNA agent comprises a sense strand and an antisense strand forming a double stranded region, wherein the sense strand comprises the nucleotide sequence of 5′-csusuaaaAfgGfGfAfcaguauucua-3′ (SEQ ID NO:15) and the antisense strand comprises the nucleotide sequence of 5′-usdAsgadAudAcuguccCfuUfuuaagscsc-3′ (SEQ ID NO:16), wherein a, g, c and u are 2′-O-methyl (2′-OMe) A, G, C, and U respectively; Af, Gf, Cf and Uf are 2′-fluoro A, G, C and U respectively; dA is a 2′-deoxyadenosine-3′-phosphate nucleotide; and s is a phosphorothioate linkage; and wherein the 3′-end of the sense strand is conjugated to a ligand as shown in the following schematic:

[chemical structure]

wherein X is O.

[0137] In one aspect, the present invention provides a double stranded ribonucleic acid (dsRNA) agent for inhibiting expression of apolipoprotein C3 in a cell, wherein the dsRNA agent comprises a sense strand and an antisense strand forming a double stranded region, wherein the sense strand consists of the nucleotide sequence of 5′-csusuaaaAfgGfGfAfcaguauucua-3′ (SEQ ID NO:15) and the antisense strand consists of the nucleotide sequence of 5′-usdAsgadAudAcuguccCfuUfuuaagscsc-3′ (SEQ ID NO:16), wherein a, g, c and u are 2′-O-methyl (2′-OMe) A, G, C, and U respectively; Af, Gf, Cf and Uf are 2′-fluoro A, G, C and U respectively; dA is a 2′-deoxyadenosine-3′-phosphate nucleotide; and s is a phosphorothioate linkage; and wherein the 3′-end of the sense strand is conjugated to a ligand as shown in the following schematic:

[chemical structure]

wherein X is O.

[0138] The present invention also provides cells containing any of the dsRNA agents of the invention and pharmaceutical compositions comprising any of the dsRNA agents of the invention.

[0139] The pharmaceutical composition of the invention may include dsRNA agent in an unbuffered solution, e.g., saline or water, or the pharmaceutical composition of the invention may include the dsRNA agent is in a buffer solution, e.g., a buffer solution comprising acetate, citrate, prolamine, carbonate, or phosphate or any combination thereof; or phosphate buffered saline (PBS).

[0140] In one aspect, the present invention provides a method of inhibiting expression of an apolipoprotein C3 (APOC3) gene in a cell. The method includes contacting the cell with any of the dsRNAs of the invention or any of the pharmaceutical compositions of the invention, thereby inhibiting expression of the APOC3 gene in the cell.

[0141] In one embodiment, the cell is within a subject, e.g., a human subject, e.g., a subject having an apolipoprotein C3-associated disorder, such as an apolipoprotein C3-associated disorder selected from the group consisting of hypertriglyceridemia, non-alcoholic fatty liver disease, non-alcoholic steatohepatitis, polycystic ovary syndrome, kidney disease, obesity, type 2 diabetes mellitus (insulin resistance), hypertension, artherosclerosis and pancreatitis.

[0142] In one embodiment, contacting the cell with the dsRNA agent inhibits the expression of APOC3 by at least 50%, 60%, 70%, 80%, 90%, or 95%.

[0143] In one embodiment, inhibiting expression of apolipoprotein C3 decreases APOC3 protein level in serum of the subject by at least 50%, 60%, 70%, 80%, 90%, or 95%.

[0144] In one aspect, the present invention provides a method of treating a subject having a disorder that would benefit from reduction in apolipoprotein C3 (APOC3) expression. The method includes administering to the subject a therapeutically effective amount of any of the dsRNAs of the invention or any of the pharmaceutical compositions of the invention, thereby treating the subject having the disorder that would benefit from reduction in APOC3 expression.

[0145] In another aspect, the present invention provides a method of preventing at least one symptom in a subject having a disorder that would benefit from reduction in apolipoprotein C3 (APOC3) expression. The method includes administering to the subject a prophylactically effective amount of any of the dsRNAs of the invention or any of the pharmaceutical compositions of the invention, thereby preventing at least one symptom in the subject having the disorder that would benefit from reduction in APOC3 expression.

[0146] In one embodiment, the disorder is am apolipoprotein C3-associated disorder, e.g., an apolipoprotein C3-associated disorder is selected from the group consisting of hypertriglyceridemia, non-alcoholic fatty liver disease, non-alcoholic steatohepatitis, polycystic ovary syndrome, kidney disease, obesity, type 2 diabetes mellitus (insulin resistance), hypertension, artherosclerosis and pancreatitis.

[0147] In one embodiment, the apolipoprotein C3-associated disorder is hypertriglyceridemia.

[0148] In one embodiment, the subject is human.

[0149] In one embodiment, the dsRNA agent is administered to the subject at a dose of about 0.01 mg/kg to about 50 mg/kg.

[0150] In one embodiment, the dsRNA agent is administered to the subject subcutaneously.

[0151] In one embodiment, the methods of the invention include further determining the level of apolipoprotein C3 in a sample(s) from the subject.

[0152] In one embodiment, the level of apolipoprotein C3 in the subject sample(s) is an apolipoprotein C3 protein level in a blood or serum sample(s).

[0153] In certain embodiments, the methods of the invention further comprise administering to the subject an additional therapeutic agent. In one embodiment, the additional therapeutic is a dsRNA agent targeting PCSK9, e.g., Inclisiran. In one embodiment, the additional therapeutic is a PCSK9 inhibitor. In one embodiment, the PCSK9 inhibitor is an anti-PCSK9 monoclonal antibody, e.g., evolocumab (Repatha®) and alirocumab (Praluent®). In another embodiment, the PCSK9 inhibitor is a dsRNA agent targeting PCSK9, e.g., Inclisiran. In a further embodiment, the additional therapeutic agent is selected from the group consisting of an HMG-CoA reductase inhibitor, a fibrate, a bile acid sequestrant, niacin, an antiplatelet agent, an angiotensin converting enzyme inhibitor, an angiotensin II receptor antagonist, an acylCoA cholesterol acetyltransferase (ACAT) inhibitor, a cholesterol absorption inhibitor, a cholesterol ester transfer protein (CETP) inhibitor, a microsomal triglyceride transfer protein (MTTP) inhibitor, a cholesterol modulator, a bile acid modulator, a peroxisome proliferation activated receptor (PPAR) agonist, a gene-based therapy, a composite vascular protectant, a glycoprotein IIb/IIIa inhibitor, aspirin or an aspirin-like compound, an IBAT inhibitor, a squalene synthase inhibitor, a monocyte chemoattractant protein (MCP)-I inhibitor, or fish oil.

[0154] The present invention also provides kits comprising any of the dsRNAs of the invention or any of the pharmaceutical compositions of the invention, and optionally, instructions for use.

### BRIEF DESCRIPTION OF THE DRAWINGS

[0155] FIG. 1 is a graph showing human APOC3 mRNA levels in mice (n=3 per group) subcutaneously administered a single 3 mg/kg dose of the indicated dsRNA duplexes, on day14 post-dose. Human APOC3 mRNA levels are shown relative to control levels detected with PBS treatment.

[0156] FIG. 2 is a graph showing human APOC3 mRNA levels in mice (n=3 per group) subcutaneously administered a single 3 mg/kg dose of the indicated dsRNA duplexes, on day14 post-dose. Human APOC3 mRNA levels are shown relative to control levels detected with PBS treatment.

[0157] FIG. 3 is a graph showing human APOC3 mRNA levels in mice (n=3 per group) subcutaneously administered a single 3 mg/kg dose of the indicated dsRNA duplexes, on day14 post-dose. Human APOC3 mRNA levels are shown relative to control levels detected with PBS treatment.

### DETAILED DESCRIPTION OF THE INVENTION

[0158] The present invention provides iRNA compositions which effect the RNA-induced silencing complex (RISC)-mediated cleavage of RNA transcripts of an apolipoprotein C3 (APO3) gene. The gene may be within a cell, e.g., a cell within a subject, such as a human. The use of these iRNAs enables the targeted degradation of mRNAs of the corresponding gene (apolipoprotein C3 gene) in mammals.

[0159] The iRNAs of the invention have been designed to target the human apolipoprotein C3 gene, including portions of the gene that are conserved in the apolipoprotein C3 orthologs of other mammalian species. Without intending to be limited by theory, it is believed that a combination or sub-combination of the foregoing properties and the specific target sites or the specific modifications in these iRNAs confer to the iRNAs of the invention improved efficacy, stability, potency, durability, and safety.

[0160] Accordingly, the present invention provides methods for treating and preventing an apolipoprotein C3-associated disorder, e.g., hypertriglyceridemia, non-alcoholic fatty liver disease, non-alcoholic steatohepatitis, polycystic ovary syndrome, kidney disease, obesity, type 2 diabetes mellitus (insulin resistance), hypertension, artherosclerosis and pancreatitis, using iRNA compositions which effect the RNA-induced silencing complex (RISC)-mediated cleavage of RNA transcripts of a apolipoprotein C3 gene.

[0161] The iRNAs of the invention include an RNA strand (the antisense strand) having a region which is up to about 30 nucleotides or less in length, e.g., 19-30, 19-29, 19-28, 19-27, 19-26, 19-25, 19-24, 19-23, 19-22, 19-21, 19-20, 20-30, 20-29, 20-28, 20-27, 20-26, 20-25, 20-24, 20-23, 20-22, 20-21, 21-30, 21-29, 21-28, 21-27, 21-26, 21-25, 21-24, 21-23, or 21-22 nucleotides in length, which region is substantially complementary to at least part of an mRNA transcript of an APOC3 gene.

[0162] In certain embodiments, one or both of the strands of the double stranded RNAi agents of the invention is up to 66 nucleotides in length, e.g., 36-66, 26-36, 25-36, 31-60, 22-43, 27-53 nucleotides in length, with a region of at least 19 contiguous nucleotides that is substantially complementary to at least a part of an mRNA transcript of an APOC3 gene. In some embodiments, such iRNA agents having longer length antisense strands preferably may include a second RNA strand (the sense strand) of 20-60 nucleotides in length wherein the sense and antisense strands form a duplex of 18-30 contiguous nucleotides.

[0163] The use of iRNAs of the invention enables the targeted degradation of mRNAs of the corresponding gene (apolipoprotein C3 gene) in mammals. Using in vitro assays, the present inventors have demonstrated that iRNAs targeting an APOC3 gene can potently mediate RNAi, resulting in significant inhibition of expression of an APOC3 gene. Thus, methods and compositions including these iRNAs are useful for treating a subject having an apolipoprotein C3-associated disorder, e.g., hypertriglyceridemia, non-alcoholic fatty liver disease, non-alcoholic steatohepatitis, polycystic ovary syndrome, kidney disease, obesity, type 2 diabetes mellitus (insulin resistance), hypertension, artherosclerosis and pancreatitis.

[0164] Accordingly, the present invention provides methods and combination therapies for treating a subject having a disorder that would benefit from inhibiting or reducing the expression of an APOC3 gene, e.g., an apolipoprotein C3-associated disease, such as hypertriglyceridemia, non-alcoholic fatty liver disease, non-alcoholic steatohepatitis, polycystic ovary syndrome, kidney disease, obesity, type 2 diabetes mellitus (insulin resistance), hypertension, artherosclerosis and pancreatitis, using iRNA compositions which effect the RNA-induced silencing complex (RISC)-mediated cleavage of RNA transcripts of an APOC3 gene.

[0165] The present invention also provides methods for preventing at least one symptom in a subject having a disorder that would benefit from inhibiting or reducing the expression of an APOC3 gene, e.g., hypertriglyceridemia, non-alcoholic fatty liver disease, non-alcoholic steatohepatitis, polycystic ovary syndrome, kidney disease, obesity, type 2 diabetes mellitus (insulin resistance), hypertension, artherosclerosis and pancreatitis. For example, in a subject having hypertriglyceridemia, the methods of the present invention may reduce at least one symptom in the subject, e.g., lower triglyceride levels.

[0166] The following detailed description discloses how to make and use compositions containing iRNAs to inhibit the expression of an APOC3 gene as well as compositions, uses, and methods for treating subjects that would benefit from inhibition and/or reduction of the expression of an APOC3 gene, e.g., subjects susceptible to or diagnosed with an apolipoprotein C3-associated disorder.

### I. Definitions

[0167] In order that the present invention may be more readily understood, certain terms are first defined. In addition, it should be noted that whenever a value or range of values of a parameter are recited, it is intended that values and ranges intermediate to the recited values are also intended to be part of this invention.

[0168] The articles “a” and “an” are used herein to refer to one or to more than one (i.e., to at least one) of the grammatical object of the article. By way of example, “an element” means one element or more than one element, e.g., a plurality of elements.

[0169] The term “including” is used herein to mean, and is used interchangeably with, the phrase “including but not limited to”.

[0170] The term “or” is used herein to mean, and is used interchangeably with, the term “and/or,” unless context clearly indicates otherwise. For example, “sense strand or antisense strand” is understood as “sense strand or antisense strand or sense strand and antisense strand.”

[0171] The term “about” is used herein to mean within the typical ranges of tolerances in the art. For example, “about” can be understood as about 2 standard deviations from the mean. In certain embodiments, about means ±10%. In certain embodiments, about means ±5%. When about is present before a series of numbers or a range, it is understood that “about” can modify each of the numbers in the series or range.

[0172] The term “at least” prior to a number or series of numbers is understood to include the number adjacent to the term “at least”, and all subsequent numbers or integers that could logically be included, as clear from context. For example, the number of nucleotides in a nucleic acid molecule must be an integer. For example, “at least 19 nucleotides of a 21 nucleotide nucleic acid molecule” means that 19, 20, or 21 nucleotides have the indicated property. When at least is present before a series of numbers or a range, it is understood that “at least” can modify each of the numbers in the series or range.

[0173] As used herein, “no more than” or “less than” is understood as the value adjacent to the phrase and logical lower values or integers, as logical from context, to zero. For example, a duplex with an overhang of “no more than 2 nucleotides” has a 2, 1, or 0 nucleotide overhang. When “no more than” is present before a series of numbers or a range, it is understood that “no more than” can modify each of the numbers in the series or range. As used herein, ranges include both the upper and lower limit.

[0174] As used herein, methods of detection can include determination that the amount of analyte present is below the level of detection of the method.

[0175] In the event of a conflict between an indicated target site and the nucleotide sequence for a sense or antisense strand, the indicated sequence takes precedence.

[0176] In the event of a conflict between a sequence and its indicated site on a transcript or other sequence, the nucleotide sequence recited in the specification takes precedence.

[0177] As used herein, the term “APOC3” refers to the well-known gene that encodes apolipoprotein C3, as well as to its protein product, also known in the art as HALP2 or APOCIII.

[0178] The term “APOC3” includes human APOC3, the amino acid and complete coding sequence of which may be found in for example, GenBank Accession No. GI:4557322 (NM_000040.3; SEQ ID NO:1; reverse complement, SEQ ID NO:2); Macaca fascicularis APOC3, the amino acid and complete coding sequence of which may be found in for example, GenBank Accession No. GI:544489959 (XM_05579730.1, SEQ ID NO:3; reverse complement, SEQ ID NO:4); Macaca mulatta APOC3, the amino acid and complete coding sequence of which may be found in for example, GenBank Accession No. GI:297269260 (XM_001090312.4; SEQ ID NO: 5; reverse complement, SEQ ID NO:6); mouse (Mus musculus) APOC3, the amino acid and complete coding sequence of which may be found in for example, GenBank Accession No. GI:577019555 (NM_023114.4, SEQ ID NO:7; reverse complement, SEQ ID NO:8); rat (Rattus norvegicus) APOC3, the amino acid and complete coding sequence of which may be found in for example, GenBank Accession No. GI:402534545 (NM_012501.2, SEQ ID NO:9; reverse complement, SEQ ID NO:2-10); and rabbit (Oryctolagus cuniculus), GenBank Accession No. GI:655601498 (XM_002708371.3, SEQ ID NO:11; reverse complement, SEQ ID NO:12).

[0179] Further information on APOC3 can be found, for example, at www.ncbi.nlm.nih.gov/gene/345.

[0180] Additional examples of APOC3 mRNA sequences are readily available through publicly available databases, e.g., GenBank, UniProt, OMIM, and the Macaca genome project web site.

[0181] The term “APOC3,” as used herein, also refers to naturally occurring DNA sequence variations of the APOC3 gene, such as a single nucleotide polymorphism (SNP) in the APOC3 gene. Exemplary SNPs in the APOC3 DNA sequence may be found through the dbSNP database available at www.ncbi.nlm.nih.gov/projects/SNP/. Non-limiting examples of sequence variations within the APOC3 gene include, for example, the two variations rs2854116 and rs2854117, described in Petersen, K. F. et al., (2010), N. Engl. J. Med. 362(12):1082-1089, the entire contents of which are incorporated herein by reference.

[0182] Exemplary APOC3 nucleotide sequences may also be found in SEQ ID NOs:1-12. SEQ ID NOs:2, 4, 6, 8, 10, and 12 are the reverse complement sequences of SEQ ID NOs:1, 3, 5, 7, 9, and 11, respectively.

[0183] The entire contents of each of the foregoing GenBank Accession numbers and the Gene database numbers are incorporated herein by reference as of the date of filing this application. As used herein, “target sequence” refers to a contiguous portion of the nucleotide sequence of an mRNA molecule formed during the transcription of an apolipoprotein C3 gene, including mRNA that is a product of RNA processing of a primary transcription product. The target portion of the sequence will be at least long enough to serve as a substrate for iRNA-directed cleavage at or near that portion of the nucleotide sequence of an mRNA molecule formed during the transcription of an APOC3 gene. In one embodiment, the target sequence is within the protein coding region of APOC3.

[0184] The target sequence may be from about 19-36 nucleotides in length, e.g., preferably about 19-30 nucleotides in length. For example, the target sequence can be about 19-30 nucleotides, 19-30, 19-29, 19-28, 19-27, 19-26, 19-25, 19-24, 19-23, 19-22, 19-21, 19-20, 20-30, 20-29, 20-28, 20-27, 20-26, 20-25, 20-24, 20-23, 20-22, 20-21, 21-30, 21-29, 21-28, 21-27, 21-26, 21-25, 21-24, 21-23, or 21-22 nucleotides in length. In certain embodiments, the target sequence is 19-23 nucleotides in length, optionally 21-23 nucleotides in length. Ranges and lengths intermediate to the above recited ranges and lengths are also contemplated to be part of the disclosure.

[0185] As used herein, the term “strand comprising a sequence” refers to an oligonucleotide comprising a chain of nucleotides that is described by the sequence referred to using the standard nucleotide nomenclature.

[0186] “G,” “C,” “A,” “T,” and “U” each generally stand for a nucleotide that contains guanine, cytosine, adenine, thymidine, and uracil as a base, respectively. However, it will be understood that the term “ribonucleotide” or “nucleotide” can also refer to a modified nucleotide, as further detailed below, or a surrogate replacement moiety (see, e.g., Table 1). The skilled person is well aware that guanine, cytosine, adenine, and uracil can be replaced by other moieties without substantially altering the base pairing properties of an oligonucleotide comprising a nucleotide bearing such replacement moiety. For example, without limitation, a nucleotide comprising inosine as its base can base pair with nucleotides containing adenine, cytosine, or uracil. Hence, nucleotides containing uracil, guanine, or adenine can be replaced in the nucleotide sequences of dsRNA featured in the invention by a nucleotide containing, for example, inosine. In another example, adenine and cytosine anywhere in the oligonucleotide can be replaced with guanine and uracil, respectively to form G-U Wobble base pairing with the target mRNA. Sequences containing such replacement moieties are suitable for the compositions and methods featured in the invention.

[0187] The terms “iRNA”, “RNAi agent,” “iRNA agent,”, “RNA interference agent” as used interchangeably herein, refer to an agent that contains RNA as that term is defined herein, and which mediates the targeted cleavage of an RNA transcript via an RNA-induced silencing complex (RISC) pathway. iRNA directs the sequence-specific degradation of mRNA through a process known as RNA interference (RNAi). The iRNA modulates, e.g., inhibits, the expression of an apolipoprotein C3 gene in a cell, e.g., a cell within a subject, such as a mammalian subject.

[0188] In one embodiment, an RNAi agent of the invention includes a single stranded RNA that interacts with a target RNA sequence, e.g., an apolipoprotein C3 target mRNA sequence, to direct the cleavage of the target RNA. Without wishing to be bound by theory it is believed that long double stranded RNA introduced into cells is broken down into siRNA by a Type III endonuclease known as Dicer (Sharp et al. (2001) Genes Dev. 15:485). Dicer, a ribonuclease-III-like enzyme, processes the dsRNA into 19-23 base pair short interfering RNAs with characteristic two base 3′ overhangs (Bernstein, et al., (2001) Nature 409:363). The siRNAs are then incorporated into an RNA-induced silencing complex (RISC) where one or more helicases unwind the siRNA duplex, enabling the complementary antisense strand to guide target recognition (Nykanen, et al., (2001) Cell 107:309). Upon binding to the appropriate target mRNA, one or more endonucleases within the RISC cleave the target to induce silencing (Elbashir, et al., (2001) Genes Dev. 15:188). Thus, in one aspect the invention relates to a single stranded RNA (siRNA) generated within a cell and which promotes the formation of a RISC complex to effect silencing of the target gene, i.e., an apolipoprotein C3 (APOC3) gene. Accordingly, the term “siRNA” is also used herein to refer to an iRNA as described above.

[0189] In certain embodiments, the RNAi agent may be a single-stranded siRNA (ssRNAi) that is introduced into a cell or organism to inhibit a target mRNA. Single-stranded RNAi agents bind to the RISC endonuclease, Argonaute 2, which then cleaves the target mRNA. The single-stranded siRNAs are generally 15-30 nucleotides and are chemically modified. The design and testing of single-stranded siRNAs are described in U.S. Pat. No. 8,101,348 and in Lima et al., (2012) Cell 150:883-894, the entire contents of each of which are hereby incorporated herein by reference. Any of the antisense nucleotide sequences described herein may be used as a single-stranded siRNA as described herein or as chemically modified by the methods described in Lima et al., (2012) Cell 150:883-894.

[0190] In certain embodiments, an “iRNA” for use in the compositions, uses, and methods of the invention is a double stranded RNA and is referred to herein as a “double stranded RNA agent,” “double stranded RNA (dsRNA) molecule,” “dsRNA agent,” or “dsRNA”. The term “dsRNA”, refers to a complex of ribonucleic acid molecules, having a duplex structure comprising two anti-parallel and substantially complementary nucleic acid strands, referred to as having “sense” and “antisense” orientations with respect to a target RNA, i.e., an apolipoprotein C3 (APOC3) gene. In some embodiments of the invention, a double stranded RNA (dsRNA) triggers the degradation of a target RNA, e.g., an mRNA, through a post-transcriptional gene-silencing mechanism referred to herein as RNA interference or RNAi.

[0191] In general, the majority of nucleotides of each strand of a dsRNA molecule are ribonucleotides, but as described in detail herein, each or both strands can also include one or more non-ribonucleotides, e.g., a deoxyribonucleotide or a modified nucleotide. In addition, as used in this specification, an “iRNA” may include ribonucleotides with chemical modifications; an iRNA may include substantial modifications at multiple nucleotides. As used herein, the term “modified nucleotide” refers to a nucleotide having, independently, a modified sugar moiety, a modified internucleotide linkage, or modified nucleobase, or any combination thereof. Thus, the term modified nucleotide encompasses substitutions, additions or removal of, e.g., a functional group or atom, to internucleoside linkages, sugar moieties, or nucleobases. The modifications suitable for use in the agents of the invention include all types of modifications disclosed herein or known in the art. Any such modifications, as used in a siRNA type molecule, are encompassed by “iRNA” or “RNAi agent” for the purposes of this specification and claims.

[0192] In certain embodiments of the instant disclosure, inclusion of a deoxy-nucleotide if present within an RNAi agent can be considered to constitute a modified nucleotide.

[0193] The duplex region may be of any length that permits specific degradation of a desired target RNA through a RISC pathway, and may range from about 19 to 36 base pairs in length, e.g., about 19-30 base pairs in length, for example, about 9, 10, 11, 12, 13, 14, 15, 16, 17, 18, 19, 20, 21, 22, 23, 24, 25, 26, 27, 28, 29, 30, 31, 32, 33, 34, 35, or 36 base pairs in length, such as about 19-30, 19-29, 19-28, 19-27, 19-26, 19-25, 19-24, 19-23, 19-22, 19-21, 19-20, 20-30, 20-29, 20-28, 20-27, 20-26, 20-25, 20-24, 20-23, 20-22, 20-21, 21-30, 21-29, 21-28, 21-27, 21-26, 21-25, 21-24, 21-23, or 21-22 base pairs in length. In certain embodiments, the duplex region is 19-21 base pairs in length, e.g., 21 base pairs in length. Ranges and lengths intermediate to the above recited ranges and lengths are also contemplated to be part of the disclosure.

[0194] The two strands forming the duplex structure may be different portions of one larger RNA molecule, or they may be separate RNA molecules. Where the two strands are part of one larger molecule, and therefore are connected by an uninterrupted chain of nucleotides between the 3′-end of one strand and the 5′-end of the respective other strand forming the duplex structure, the connecting RNA chain is referred to as a “hairpin loop.” A hairpin loop can comprise at least one unpaired nucleotide. In some embodiments, the hairpin loop can comprise at least 2, 3, 4, 5, 6, 7, 8, 9, 10, 20, 23 or more unpaired nucleotides. In some embodiments, the hairpin loop can be 10 or fewer nucleotides. In some embodiments, the hairpin loop can be 8 or fewer unpaired nucleotides. In some embodiments, the hairpin loop can be 4-10 unpaired nucleotides. In some embodiments, the hairpin loop can be 4-8 nucleotides.

[0195] Where the two substantially complementary strands of a dsRNA are comprised by separate RNA molecules, those molecules need not be, but can be covalently connected. Where the two strands are connected covalently by means other than an uninterrupted chain of nucleotides between the 3′-end of one strand and the 5′-end of the respective other strand forming the duplex structure, the connecting structure is referred to as a “linker.” The RNA strands may have the same or a different number of nucleotides. The maximum number of base pairs is the number of nucleotides in the shortest strand of the dsRNA minus any overhangs that are present in the duplex. In addition to the duplex structure, an RNAi may comprise one or more nucleotide overhangs. In one embodiment of the RNAi agent, at least one strand comprises a 3′ overhang of at least 1 nucleotide. In another embodiment, at least one strand comprises a 3′ overhang of at least 2 nucleotides, e.g., 2, 3, 4, 5, 6, 7, 9, 10, 11, 12, 13, 14, or 15 nucleotides. In other embodiments, at least one strand of the RNAi agent comprises a 5′ overhang of at least 1 nucleotide. In certain embodiments, at least one strand comprises a 5′ overhang of at least 2 nucleotides, e.g., 2, 3, 4, 5, 6, 7, 9, 10, 11, 12, 13, 14, or 15 nucleotides. In still other embodiments, both the 3′ and the 5′ end of one strand of the RNAi agent comprise an overhang of at least 1 nucleotide.

[0196] In certain embodiments, an iRNA agent of the invention is a dsRNA, each strand of which comprises 19-23 nucleotides, that interacts with a target RNA sequence, e.g., an apolipoprotein C3 (APOC3) gene, to direct cleavage of the target RNA.

[0197] In some embodiments, an iRNA of the invention is a dsRNA of 24-30 nucleotides that interacts with a target RNA sequence, e.g., an APOC3 target mRNA sequence, to direct the cleavage of the target RNA.

[0198] As used herein, the term “nucleotide overhang” refers to at least one unpaired nucleotide that protrudes from the duplex structure of a double stranded iRNA. For example, when a 3′-end of one strand of a dsRNA extends beyond the 5′-end of the other strand, or vice versa, there is a nucleotide overhang. A dsRNA can comprise an overhang of at least one nucleotide; alternatively the overhang can comprise at least two nucleotides, at least three nucleotides, at least four nucleotides, at least five nucleotides or more. A nucleotide overhang can comprise or consist of a nucleotide/nucleoside analog, including a deoxynucleotide/nucleoside. The overhang(s) can be on the sense strand, the antisense strand, or any combination thereof. Furthermore, the nucleotide(s) of an overhang can be present on the 5′-end, 3′-end, or both ends of either an antisense or sense strand of a dsRNA.

[0199] In one embodiment, the antisense strand of a dsRNA has a 1-10 nucleotide, e.g., a 1, 2, 3, 4, 5, 6, 7, 8, 9, or 10 nucleotide, overhang at the 3′-end or the 5′-end. In one embodiment, the sense strand of a dsRNA has a 1-10 nucleotide, e.g., a 1, 2, 3, 4, 5, 6, 7, 8, 9, or 10 nucleotide, overhang at the 3′-end or the 5′-end. In another embodiment, one or more of the nucleotides in the overhang is replaced with a nucleoside thiophosphate.

[0200] In certain embodiments, the antisense strand of a dsRNA has a 1-10 nucleotide, e.g., 0-3, 1-3, 2-4, 2-5, 4-10, 5-10, e.g., a 1, 2, 3, 4, 5, 6, 7, 8, 9, or 10 nucleotide, overhang at the 3′-end or the 5′-end. In one embodiment, the sense strand of a dsRNA has a 1-10 nucleotide, e.g., a 1, 2, 3, 4, 5, 6, 7, 8, 9, or 10 nucleotide, overhang at the 3′-end or the 5′-end. In another embodiment, one or more of the nucleotides in the overhang is replaced with a nucleoside thiophosphate.

[0201] In certain embodiments, the antisense strand of a dsRNA has a 1-10 nucleotides, e.g., a 1, 2, 3, 4, 5, 6, 7, 8, 9, or 10 nucleotide, overhang at the 3′-end or the 5′-end. In certain embodiments, the overhang on the sense strand or the antisense strand, or both, can include extended lengths longer than 10 nucleotides, e.g., 1-30 nucleotides, 2-30 nucleotides, 10-30 nucleotides, 10-25 nucleotides, 10-20 nucleotides, or 10-15 nucleotides in length. In certain embodiments, an extended overhang is on the sense strand of the duplex. In certain embodiments, an extended overhang is present on the 3′ end of the sense strand of the duplex. In certain embodiments, an extended overhang is present on the 5′ end of the sense strand of the duplex. In certain embodiments, an extended overhang is on the antisense strand of the duplex. In certain embodiments, an extended overhang is present on the 3′end of the antisense strand of the duplex. In certain embodiments, an extended overhang is present on the 5′end of the antisense strand of the duplex. In certain embodiments, one or more of the nucleotides in the extended overhang is replaced with a nucleoside thiophosphate. In certain embodiments, the overhang includes a self-complementary portion such that the overhang is capable of forming a hairpin structure that is stable under physiological conditions.

[0202] “Blunt” or “blunt end” means that there are no unpaired nucleotides at that end of the double stranded RNA agent, i.e., no nucleotide overhang. A “blunt ended” double stranded RNA agent is double stranded over its entire length, i.e., no nucleotide overhang at either end of the molecule. The RNAi agents of the invention include RNAi agents with no nucleotide overhang at one end (i.e., agents with one overhang and one blunt end) or with no nucleotide overhangs at either end. Most often such a molecule will be double-stranded over its entire length.

[0203] The term “antisense strand” or “guide strand” refers to the strand of an iRNA, e.g., a dsRNA, which includes a region that is substantially complementary to a target sequence, e.g., an APOC3 mRNA.

[0204] As used herein, the term “region of complementarity” refers to the region on the antisense strand that is substantially complementary to a sequence, for example a target sequence, e.g., an apolipoprotein C3 nucleotide sequence, as defined herein. Where the region of complementarity is not fully complementary to the target sequence, the mismatches can be in the internal or terminal regions of the molecule. Generally, the most tolerated mismatches are in the terminal regions, e.g., within 5, 4, or 3 nucleotides of the 5′- or 3′-end of the iRNA. In some embodiments, a double stranded RNA agent of the invention includes a nucleotide mismatch in the antisense strand. In some embodiments, the antisense strand of the double stranded RNA agent of the invention includes no more than 4 mismatches with the target mRNA, e.g., the antisense strand includes 4, 3, 2, 1, or 0 mismatches with the target mRNA. In some embodiments, the antisense strand double stranded RNA agent of the invention includes no more than 4 mismatches with the sense strand, e.g., the antisense strand includes 4, 3, 2, 1, or 0 mismatches with the sense strand. In some embodiments, a double stranded RNA agent of the invention includes a nucleotide mismatch in the sense strand. In some embodiments, the sense strand of the double stranded RNA agent of the invention includes no more than 4 mismatches with the antisense strand, e.g., the sense strand includes 4, 3, 2, 1, or 0 mismatches with the antisense strand. In some embodiments, the nucleotide mismatch is, for example, within 5, 4, 3 nucleotides from the 3′-end of the iRNA. In another embodiment, the nucleotide mismatch is, for example, in the 3′-terminal nucleotide of the iRNA agent. In some embodiments, the mismatch(s) is not in the seed region.

[0205] Thus, an RNAi agent as described herein can contain one or more mismatches to the target sequence. In one embodiment, a RNAi agent as described herein contains no more than 3 mismatches (i.e., 3, 2, 1, or 0 mismatches). In one embodiment, an RNAi agent as described herein contains no more than 2 mismatches. In one embodiment, an RNAi agent as described herein contains no more than 1 mismatch. In one embodiment, an RNAi agent as described herein contains 0 mismatches. In certain embodiments, if the antisense strand of the RNAi agent contains mismatches to the target sequence, the mismatch can optionally be restricted to be within the last 5 nucleotides from either the 5′- or 3′-end of the region of complementarity. For example, in such embodiments, for a 23 nucleotide RNAi agent, the strand which is complementary to a region of an APOC3 gene, generally does not contain any mismatch within the central 13 nucleotides. The methods described herein or methods known in the art can be used to determine whether an RNAi agent containing a mismatch to a target sequence is effective in inhibiting the expression of an APOC3 gene. Consideration of the efficacy of RNAi agents with mismatches in inhibiting expression of an APOC3 gene is important, especially if the particular region of complementarity in an APOC3 gene is known to have polymorphic sequence variation within the population.

[0206] The term “sense strand” or “passenger strand” as used herein, refers to the strand of an iRNA that includes a region that is substantially complementary to a region of the antisense strand as that term is defined herein.

[0207] As used herein, “substantially all of the nucleotides are modified” are largely but not wholly modified and can include not more than 5, 4, 3, 2, or 1 unmodified nucleotides.

[0208] As used herein, the term “cleavage region” refers to a region that is located immediately adjacent to the cleavage site. The cleavage site is the site on the target at which cleavage occurs. In some embodiments, the cleavage region comprises three bases on either end of, and immediately adjacent to, the cleavage site. In some embodiments, the cleavage region comprises two bases on either end of, and immediately adjacent to, the cleavage site. In some embodiments, the cleavage site specifically occurs at the site bound by nucleotides 10 and 11 of the antisense strand, and the cleavage region comprises nucleotides 11, 12 and 13.

[0209] As used herein, and unless otherwise indicated, the term “complementary,” when used to describe a first nucleotide sequence in relation to a second nucleotide sequence, refers to the ability of an oligonucleotide or polynucleotide comprising the first nucleotide sequence to hybridize and form a duplex structure under certain conditions with an oligonucleotide or polynucleotide comprising the second nucleotide sequence, as will be understood by the skilled person. Such conditions can, for example, be stringent conditions, where stringent conditions can include: 400 mM NaCl, 40 mM PIPES pH 6.4, 1 mM EDTA, 50° C. or 70° C. for 12-16 hours followed by washing (see, e.g., “Molecular Cloning: A Laboratory Manual, Sambrook, et al. (1989) Cold Spring Harbor Laboratory Press). Other conditions, such as physiologically relevant conditions as can be encountered inside an organism, can apply. The skilled person will be able to determine the set of conditions most appropriate for a test of complementarity of two sequences in accordance with the ultimate application of the hybridized nucleotides.

[0210] Complementary sequences within an iRNA, e.g., within a dsRNA as described herein, include base-pairing of the oligonucleotide or polynucleotide comprising a first nucleotide sequence to an oligonucleotide or polynucleotide comprising a second nucleotide sequence over the entire length of one or both nucleotide sequences. Such sequences can be referred to as “fully complementary” with respect to each other herein. However, where a first sequence is referred to as “substantially complementary” with respect to a second sequence herein, the two sequences can be fully complementary, or they can form one or more, but generally not more than 5, 4, 3, or 2 mismatched base pairs upon hybridization for a duplex up to 30 base pairs, while retaining the ability to hybridize under the conditions most relevant to their ultimate application, e.g., inhibition of gene expression via a RISC pathway. However, where two oligonucleotides are designed to form, upon hybridization, one or more single stranded overhangs, such overhangs shall not be regarded as mismatches with regard to the determination of complementarity. For example, a dsRNA comprising one oligonucleotide 21 nucleotides in length and another oligonucleotide 23 nucleotides in length, wherein the longer oligonucleotide comprises a sequence of 21 nucleotides that is fully complementary to the shorter oligonucleotide, can yet be referred to as “fully complementary” for the purposes described herein.

[0211] “Complementary” sequences, as used herein, can also include, or be formed entirely from, non-Watson-Crick base pairs or base pairs formed from non-natural and modified nucleotides, in so far as the above requirements with respect to their ability to hybridize are fulfilled. Such non-Watson-Crick base pairs include, but are not limited to, G:U Wobble or Hoogstein base pairing.

[0212] The terms “complementary,” “fully complementary” and “substantially complementary” herein can be used with respect to the base matching between the sense strand and the antisense strand of a dsRNA, or between the antisense strand of a double stranded RNA agent and a target sequence, as will be understood from the context of their use.

[0213] As used herein, a polynucleotide that is “substantially complementary to at least part of” a messenger RNA (mRNA) refers to a polynucleotide that is substantially complementary to a contiguous portion of the mRNA of interest (e.g., an mRNA encoding an apolipoprotein C3 gene). For example, a polynucleotide is complementary to at least a part of an apolipoprotein C3 mRNA if the sequence is substantially complementary to a non-interrupted portion of an mRNA encoding an apolipoprotein C3 gene.

[0214] Accordingly, in some embodiments, the antisense polynucleotides disclosed herein are fully complementary to the target APOC3 sequence. In other embodiments, the antisense polynucleotides disclosed herein are substantially complementary to the target APOC3 sequence and comprise a contiguous nucleotide sequence which is at least 80% complementary over its entire length to the equivalent region of the nucleotide sequence of any one of SEQ ID NOs:1, 3, 5, 7, 9, or 11, or a fragment of any one of SEQ ID NOs:1-1, 3, 5, 7, 9, or 11, such as about 85%, about 90%, about 91%, about 92%, about 93%, about 94%, about 95%, about 96%, about 97%, about 98%, or about 99% complementary.

[0215] In some embodiments, the antisense polynucleotides disclosed herein are substantially complementary to a fragment of a target APOC3 sequence and comprise a contiguous nucleotide sequence which is at least 80% complementary over its entire length to a fragment of SEQ ID NO: 1 selected from the group of nucleotides; 232-254; 233-255; 238-260; 239-261; 242-264; 243-265; 244-266; 264-286; 268-290; 426-448; 431-453; 432-454; 433-455; 435-457; 436-458; 499-521; 500-522; 503-525; 504-526; 507-529; 510-532; and 511-533 of SEQ ID NO: 1, such as about 85%, about 90%, about 91%, about 92%, about 93%, about 94%, about 95%, about 96%, about 97%, about 98%, or about 99% complementary.

[0216] In other embodiments, the antisense polynucleotides disclosed herein are substantially complementary to a fragment of a target APOC3 sequence and comprise a contiguous nucleotide sequence which is at least 80% complementary over its entire length to a fragment of SEQ ID NO: 1 selected from the group of nucleotides 235-257; 238-260; 242-264; 243-265; 244-266; 426-448; 430-450; 431-453; 432-454; 433-455; 435-457; 436-458; 499-521; 503-525; and 504-526 of SEQ ID NO: 1, such as about 85%, about 90%, about 91%, about 92%, about 93%, about 94%, about 95%, about 96%, about 97%, about 98%, or about 99% complementary. In some embodiments, the antisense polynucleotides disclosed herein are substantially complementary to a fragment of a target APOC3 sequence and comprise a contiguous nucleotide sequence which is at least 80% complementary over its entire length to a fragment of SEQ ID NO: 1 selected from the group of nucleotides 232-254; 239-261; 242-264; 244-266; 258-280; 264-286; 268-290, 429-451; 430-450; 430-452; 433-455; 434-456; 435-457; 500-522; 503-525; 507-529; and 510-532; and 504-526 of SEQ ID NO: 1, such as about 85%, about 90%, about 91%, about 92%, about 93%, about 94%, about 95%, about 96%, about 97%, about 98%, or about 99% complementary.

[0217] In other embodiments, the antisense polynucleotides disclosed herein are substantially complementary to a fragment of a target APOC3 sequence and comprise a contiguous nucleotide sequence which is at least 80% complementary over its entire length to a fragment of SEQ ID NO: 1 selected from the group of nucleotides 429-451; 430-452; 431-451; 432-452; 433-455; 504-526; and 506-526 of SEQ ID NO: 1, such as about 85%, about 90%, about 91%, about 92%, about 93%, about 94%, about 95%, about 96%, about 97%, about 98%, or about 99% complementary.

[0218] In other embodiments, the antisense polynucleotides disclosed herein are substantially complementary to the target APOC3 sequence and comprise a contiguous nucleotide sequence which is at least about 80% complementary over its entire length to any one of the sense strand nucleotide sequences in any one of any one of Tables 2-5, 14, and 15, or a fragment of any one of the sense strand nucleotide sequences in any one of Tables 2-5, 14, and 15, such as about 85%, about 90%, about 91%, about 92%, about 93%, about 94%, about 95%, about 96%, about 97%, about 98%, about 99%, or 100% complementary.

[0219] In one embodiment, an RNAi agent of the disclosure includes a sense strand that is substantially complementary to an antisense polynucleotide which, in turn, is the same as a target APOC3 sequence, and wherein the sense strand polynucleotide comprises a contiguous nucleotide sequence which is at least about 80% complementary over its entire length to the equivalent region of the nucleotide sequence of SEQ ID NOs: 2, 4, 6, 8, 10, or 12, or a fragment of any one of SEQ ID NOs:2, 4, 6, 8, 10, or 12, such as about 85%, about 90%, about 91%, about 92%, about 93%, about 94%, about 95%, about 96%, about 97%, about 98%, about 99%, or 100% complementary.

[0220] In some embodiments, an iRNA of the invention includes a sense strand that is substantially complementary to an antisense polynucleotide which, in turn, is complementary to a target apolipoprotein C3 sequence, and wherein the sense strand polynucleotide comprises a contiguous nucleotide sequence which is at least about 80% complementary over its entire length to any one of the antisense strand nucleotide sequences in any one of any one of Tables 2-5, 14, and 15, or a fragment of any one of the antisense strand nucleotide sequences in any one of Tables 2-5, 14, and 15, such as about 85%, about 90%, about 91%, about 92%, about 93%, about 94%, about 95%, about 96%, about 97%, about 98%, about 99%, or 100% complementary

[0221] In certain embodiments, the sense and antisense strands are selected from any one of duplexes AD-959917.1; AD-959918.1; AD-960096.1; AD-960064.1; AD-959914.1; AD-959941.1; AD-960031.1; AD-960063.1; AD-960293.1; AD-960288.1; AD-960445.1; AD-960292.1; AD-960475.1; AD-960442.1; AD-960470.1; AD-960436.1; AD-960446.1; AD-960474.1; AD-960294.1; AD-960471.1; AD-960314.1; AD-960443.1; AD-960282.1; AD-960283.1; AD-80794.7; AD-960478.1; AD-960481.1; or AD-960482.1.

[0222] In other embodiments, the sense and antisense strands are selected from any one of duplexes AD-959917.1; AD-960064.1; AD-960031.1; AD-960063.1; AD-960293.1; AD-960288.1; AD-960445.1; AD-960292.1; AD-960475.1; AD-960442.1; AD-960470.1; AD-960436.1; AD-960446.1; AD-960474.1; AD-960294.1; AD-960443.1; AD-80794.7; and AD-959910.1.

[0223] In some embodiments, the sense and antisense strands are selected from any one of duplexes AD-80794.8; AD-959907.2; AD-959914.2; AD-959916.2; AD-959932.2; AD-960314.2; AD-959941.2; AD-960030.2; AD-960062.2; AD-960064.2; AD-960065.2; AD-960066.2; AD-960294.2; AD-960471.2; AD-960474.2; AD-960478.2; and AD-960481.2.

[0224] In other embodiments, the sense and antisense strands are selected from any one of duplexes AD-960030; AD-1143243; AD-1143245; AD-1143247; AD-1143249; AD-1143256; AD-1143260; AD-1143278; AD-1143287; AD-1143295; AD-1143299; AD-1143302; and AD-1143305.

[0225] In one embodiment, the sense and antisense strands are of duplex AD-1143243.

[0226] In general, an “iRNA” includes ribonucleotides with chemical modifications. Such modifications may include all types of modifications disclosed herein or known in the art. Any such modifications, as used in a dsRNA molecule, are encompassed by “iRNA” for the purposes of this specification and claims.

[0227] In certain embodiments of the instant disclosure, inclusion of a deoxy-nucleotide if present within an RNAi agent can be considered to constitute a modified nucleotide.

[0228] In an aspect of the invention, an agent for use in the methods and compositions of the invention is a single-stranded antisense oligonucleotide molecule that inhibits a target mRNA via an antisense inhibition mechanism. The single-stranded antisense oligonucleotide molecule is complementary to a sequence within the target mRNA. The single-stranded antisense oligonucleotides can inhibit translation in a stoichiometric manner by base pairing to the mRNA and physically obstructing the translation machinery, see Dias, N. et al., (2002) Mol Cancer Ther 1:347-355. The single-stranded antisense oligonucleotide molecule may be about 14 to about 30 nucleotides in length and have a sequence that is complementary to a target sequence. For example, the single-stranded antisense oligonucleotide molecule may comprise a sequence that is at least about 14, 15, 16, 17, 18, 19, 20, or more contiguous nucleotides from any one of the antisense sequences described herein.

[0229] The phrase “contacting a cell with an iRNA,” such as a dsRNA, as used herein, includes contacting a cell by any possible means. Contacting a cell with an iRNA includes contacting a cell in vitro with the iRNA or contacting a cell in vivo with the iRNA. The contacting may be done directly or indirectly. Thus, for example, the iRNA may be put into physical contact with the cell by the individual performing the method, or alternatively, the iRNA may be put into a situation that will permit or cause it to subsequently come into contact with the cell.

[0230] Contacting a cell in vitro may be done, for example, by incubating the cell with the iRNA. Contacting a cell in vivo may be done, for example, by injecting the iRNA into or near the tissue where the cell is located, or by injecting the iRNA into another area, e.g., the bloodstream or the subcutaneous space, such that the agent will subsequently reach the tissue where the cell to be contacted is located. For example, the iRNA may contain or be coupled to a ligand, e.g., GalNAc, that directs the iRNA to a site of interest, e.g., the liver. Combinations of in vitro and in vivo methods of contacting are also possible. For example, a cell may also be contacted in vitro with an iRNA and subsequently transplanted into a subject.

[0231] In certain embodiments, contacting a cell with an iRNA includes “introducing” or “delivering the iRNA into the cell” by facilitating or effecting uptake or absorption into the cell. Absorption or uptake of an iRNA can occur through unaided diffusion or active cellular processes, or by auxiliary agents or devices. Introducing an iRNA into a cell may be in vitro or in vivo. For example, for in vivo introduction, iRNA can be injected into a tissue site or administered systemically. In vitro introduction into a cell includes methods known in the art such as electroporation and lipofection. Further approaches are described herein below or are known in the art.

[0232] The term “lipid nanoparticle” or “LNP” is a vesicle comprising a lipid layer encapsulating a pharmaceutically active molecule, such as a nucleic acid molecule, e.g., an iRNA or a plasmid from which an iRNA is transcribed. LNPs are described in, for example, U.S. Pat. Nos. 6,858,225, 6,815,432, 8,158,601, and 8,058,069, the entire contents of which are hereby incorporated herein by reference.

[0233] As used herein, a “subject” is an animal, such as a mammal, including a primate (such as a human, a non-human primate, e.g., a monkey, and a chimpanzee), a non-primate (such as a cow, a pig, a horse, a goat, a rabbit, a sheep, a hamster, a guinea pig, a cat, a dog, a rat, or a mouse), or a bird that expresses the target gene, either endogenously or heterologously. In an embodiment, the subject is a human, such as a human being treated or assessed for a disease or disorder that would benefit from reduction in APOC3 expression; a human at risk for a disease or disorder that would benefit from reduction in APOC3 expression; a human having a disease or disorder that would benefit from reduction in APOC3 expression; or human being treated for a disease or disorder that would benefit from reduction in APOC3 expression as described herein. In some embodiments, the subject is a female human. In other embodiments, the subject is a male human. In one embodiment, the subject is an adult subject. In another embodiment, the subject is a pediatric subject.

[0234] As used herein, the terms “treating” or “treatment” refer to a beneficial or desired result, such as reducing at least one sign or symptom of an APOC3-associated disorder in a subject. Treatment also includes a reduction of one or more sign or symptoms associated with unwanted APOC3 expression; diminishing the extent of unwanted APOC3 activation or stabilization; amelioration or palliation of unwanted APOC3 activation or stabilization. “Treatment” can also mean prolonging survival as compared to expected survival in the absence of treatment. The term “lower” in the context of the level of APOC3 in a subject or a disease marker or symptom refers to a statistically significant decrease in such level. The decrease can be, for example, at least 10%, 15%, 20%, 25%, 30%, %, 40%, 45%, 50%, 55%, 60%, 65%, 70%, 75%, 80%, 85%, 90%, 95%, or more. In certain embodiments, a decrease is at least 20%. In certain embodiments, the decrease is at least 50% in a disease marker, e.g., protein or gene expression level. “Lower” in the context of the level of APOC3 in a subject is preferably down to a level accepted as within the range of normal for an individual without such disorder. In certain embodiments, “lower” is the decrease in the difference between the level of a marker or symptom for a subject suffering from a disease and a level accepted within the range of normal for an individual, e.g., the level of decrease in bodyweight between an obese individual and an individual having a weight accepted within the range of normal.

[0235] As used herein, “prevention” or “preventing,” when used in reference to a disease, disorder or condition thereof, may be treated or ameliorated by a reduction in expression of an APOC3 gene, refers to a reduction in the likelihood that a subject will develop a symptom associated with such a disease, disorder, or condition, e.g., a symptom of unwanted or excessive APOC3 expression, such as hypertriglyceridemia. The likelihood of developing, e.g., hypertriglyceridemia, is reduced, for example, when an individual having one or more risk factors for hypertriglyceridemia either fails to develop hypertriglyceridemia or develops hypertriglyceridemia with less severity relative to a population having the same risk factors and not receiving treatment as described herein. The failure to develop a disease, disorder or condition, or the reduction in the development of a symptom associated with such a disease, disorder or condition (e.g., by at least about 10% on a clinically accepted scale for that disease or disorder), or the exhibition of delayed symptoms delayed (e.g., by days, weeks, months or years) is considered effective prevention.

[0236] As used herein, the term “apolipoprotein C3-associated disease” or “APOC3-associated disease,” is a disease, disorder or a condition that is caused by, or is associated with, unwanted or excessive APOC3 expression. The term “APOC3-associated disease” includes a disease, disorder or condition that may be treated or ameliorated by a reduction in APOC3 expression. The term APOC3-associated disease” includes hypertriglyceridemia, or a high triglyceride levels.

[0237] The levels of triglycerides in a serum of a subject, e.g., a human subject, that may be indicative of hypertriglyceridemia are described in Oh, R. C. et al., (2007) American Family Physician, 75(9):1366-1371. Specifically, hypertriglyceridemia may be associated with “borderline-high serum triglyceride levels” (i.e., 150 to 199 mg per dL or 1.70 to 2.25 mmol per L); “high serum triglyceride levels” (i.e., 200 to 499 mg per dL or 2.26 to 5.64 mmol per L); or “very high triglyceride levels” (i.e., 500 mg per dL or higher (or 5.65 mmol per L or higher)

[0238] In one embodiment, an APOC3-associated disease is primary hypertriglyceridemia. “Primary triglyceridaemia” results from environmental or genetic causes (e.g., a result of no obvious underlying medical cause). Exemplary diseases characterized as primary hypertriglyceridemias include, but are not limited to, familial chylomicronemia (hyperlipoproteinemia type I), primary mixed hyperlipidemia (type 5), familial hypertriglyceridemia (hyperlipoproteinemia type 4), familial combined hyperlipoproteinemia (type 2B) and familial dysbetalipoproteinemia (hyperlipoproteinemia type 3).

[0239] In another embodiment, an APOC3-associated disease is secondary hypertriglyceridemia. “Secondary triglyceridaemia” is caused by, or be associated with, other underlying disorders and conditions. Such disorders and/or conditions include, e.g., obesity, metabolic syndrome, diabetes, fatty liver, alcohol use, renal disease, pregnancy, nonalcoholic fatty liver disorder, hypothyroidism, paraproteinemias (such as hypergammaglobulinemia in macroglobulinemia, myeloma, lymphoma and lymphocytic leukemias), autoimmune disorders (such as systemic lupus erythematosis), intake of medications (such as antiretroviral drugs, including ritonavir and lopinavir, and antipsychotic medications, including clozapine and olanzapine), see G. Yuan et al., (2007) Canadian Medical Association Journal, 176(8):1113-1120.

[0240] Any disorder that may be a cause of hypertriglyceridemia (e.g., secondary hypertriglyceridemia) or that may be a consequence of hypertriglyceridemia (e.g., primary or secondary hypertriglyceridemia) is encompassed by the term “APOC3-associated disease”. Non-limiting examples of APOC3-associated diseases include metabolic disorders, e.g., non-alcoholic fatty liver disease, non-alcoholic steatohepatitis, polycystic ovary syndrome, kidney disease, obesity, type 2 diabetes mellitus (insulin resistance); hypertension; cardiovascular disorders, e.g., artherosclerosis; and pancreatitis, e.g., acute pancreatitis.

[0241] “Therapeutically effective amount,” as used herein, is intended to include the amount of an RNAi agent that, when administered to a subject having an APOC3-associated disease, is sufficient to effect treatment of the disease (e.g., by diminishing, ameliorating, or maintaining the existing disease or one or more symptoms of disease). The “therapeutically effective amount” may vary depending on the RNAi agent, how the agent is administered, the disease and its severity and the history, age, weight, family history, genetic makeup, the types of preceding or concomitant treatments, if any, and other individual characteristics of the subject to be treated.

[0242] “Prophylactically effective amount,” as used herein, is intended to include the amount of an RNAi agent that, when administered to a subject having an APOC3-associated disorder, is sufficient to prevent or ameliorate the disease or one or more symptoms of the disease. Ameliorating the disease includes slowing the course of the disease or reducing the severity of later-developing disease. The “prophylactically effective amount” may vary depending on the RNAi agent, how the agent is administered, the degree of risk of disease, and the history, age, weight, family history, genetic makeup, the types of preceding or concomitant treatments, if any, and other individual characteristics of the patient to be treated.

[0243] A “therapeutically-effective amount” or “prophylactically effective amount” also includes an amount of an RNAi agent that produces some desired effect at a reasonable benefit/risk ratio applicable to any treatment. The iRNA employed in the methods of the present invention may be administered in a sufficient amount to produce a reasonable benefit/risk ratio applicable to such treatment.

[0244] The phrase “pharmaceutically acceptable” is employed herein to refer to those compounds, materials, compositions, or dosage forms which are, within the scope of sound medical judgment, suitable for use in contact with the tissues of human subjects and animal subjects without excessive toxicity, irritation, allergic response, or other problem or complication, commensurate with a reasonable benefit/risk ratio.

[0245] The phrase “pharmaceutically-acceptable carrier” as used herein means a pharmaceutically-acceptable material, composition, or vehicle, such as a liquid or solid filler, diluent, excipient, manufacturing aid (e.g., lubricant, talc magnesium, calcium or zinc stearate, or steric acid), or solvent encapsulating material, involved in carrying or transporting the subject compound from one organ, or portion of the body, to another organ, or portion of the body. Each carrier must be “acceptable” in the sense of being compatible with the other ingredients of the formulation and not injurious to the subject being treated. Such carriers are known in the art. Pharmaceutically acceptable carriers include carriers for administration by injection.

[0246] The term “sample,” as used herein, includes a collection of similar fluids, cells, or tissues isolated from a subject, as well as fluids, cells, or tissues present within a subject. Examples of biological fluids include blood, serum and serosal fluids, plasma, cerebrospinal fluid, ocular fluids, lymph, urine, saliva, and the like. Tissue samples may include samples from tissues, organs, or localized regions. For example, samples may be derived from particular organs, parts of organs, or fluids or cells within those organs. In certain embodiments, samples may be derived from the liver (e.g., whole liver or certain segments of liver or certain types of cells in the liver, such as, e.g., hepatocytes). In some embodiments, a “sample derived from a subject” refers to urine obtained from the subject. A “sample derived from a subject” can refer to blood or blood derived serum or plasma from the subject.

### II. iRNAs of the Invention

[0247] The present invention provides iRNAs which inhibit the expression of an apolipoprotein C3 gene. In preferred embodiments, the iRNA includes double stranded ribonucleic acid (dsRNA) molecules for inhibiting the expression of an APOC3 gene in a cell, such as a cell within a subject, e.g., a mammal, such as a human susceptible to developing an apolipoprotein C3-associated disorder, e.g., hypertriglyceridemia. The dsRNAi agent includes an antisense strand having a region of complementarity which is complementary to at least a part of an mRNA formed in the expression of an APOC3 gene. The region of complementarity is about 19-30 nucleotides in length (e.g., about 30, 29, 28, 27, 26, 25, 24, 23, 22, 21, 20, or 19 nucleotides in length). Upon contact with a cell expressing the APOC3 gene, the iRNA inhibits the expression of the APOC3 gene (e.g., a human, a primate, a non-primate, or a rat APOC3 gene) by at least about 50% as assayed by, for example, a PCR or branched DNA (bDNA)-based method, or by a protein-based method, such as by immunofluorescence analysis, using, for example, western blotting or flow cytometric techniques. In preferred embodiments, inhibition of expression is determined by the qPCR method provided in the examples herein with the siRNA at, e.g., a 10 nM concentration, in an appropriate organism cell line provided therein. In preferred embodiments, inhibition of expression in vivo is determined by knockdown of the human gene in a rodent expressing the human gene, e.g., a mouse or an AAV-infected mouse expressing the human target gene, e.g., when administered as single dose, e.g., at 3 mg/kg at the nadir of RNA expression.

[0248] A dsRNA includes two RNA strands that are complementary and hybridize to form a duplex structure under conditions in which the dsRNA will be used. One strand of a dsRNA (the antisense strand) includes a region of complementarity that is substantially complementary, and generally fully complementary, to a target sequence. The target sequence can be derived from the sequence of an mRNA formed during the expression of an APOC3 gene. The other strand (the sense strand) includes a region that is complementary to the antisense strand, such that the two strands hybridize and form a duplex structure when combined under suitable conditions. As described elsewhere herein and as known in the art, the complementary sequences of a dsRNA can also be contained as self-complementary regions of a single nucleic acid molecule, as opposed to being on separate oligonucleotides.

[0249] Generally, the duplex structure is 15 to 30 base pairs in length, e.g., 15-29, 15-28, 15-27, 15-26, 15-25, 15-24, 15-23, 15-22, 15-21, 15-20, 15-19, 15-18, 15-17, 18-30, 18-29, 18-28, 18-27, 18-26, 18-25, 18-24, 18-23, 18-22, 18-21, 18-20, 19-30, 19-29, 19-28, 19-27, 19-26, 19-25, 19-24, 19-23, 19-22, 19-21, 19-20, 20-30, 20-29, 20-28, 20-27, 20-26, 20-25, 20-24, 20-23, 20-22, 20-21, 21-30, 21-29, 21-28, 21-27, 21-26, 21-25, 21-24, 21-23, or 21-22 base pairs in length. In certain preferred embodiments, the duplex structure is 18 to 25 base pairs in length, e.g., 18-25, 18-24, 18-23, 18-22, 18-21, 18-20, 19-25, 19-24, 19-23, 19-22, 19-21, 19-20, 20-25, 20-24, 20-23, 20-22, 20-21, 21-25, 21-24, 21-23, 21-22, 22-25, 22-24, 22-23, 23-25, 23-24 or 24-25 base pairs in length, for example, 19-21 basepairs in length. Ranges and lengths intermediate to the above recited ranges and lengths are also contemplated to be part of the disclosure.

[0250] Similarly, the region of complementarity to the target sequence is 15 to 30 nucleotides in length, e.g., 15-29, 15-28, 15-27, 15-26, 15-25, 15-24, 15-23, 15-22, 15-21, 15-20, 15-19, 15-18, 15-17, 18-30, 18-29, 18-28, 18-27, 18-26, 18-25, 18-24, 18-23, 18-22, 18-21, 18-20, 19-30, 19-29, 19-28, 19-27, 19-26, 19-25, 19-24, 19-23, 19-22, 19-21, 19-20, 20-30, 20-29, 20-28, 20-27, 20-26, 20-25, 20-24, 20-23, 20-22, 20-21, 21-30, 21-29, 21-28, 21-27, 21-26, 21-25, 21-24, 21-23, or 21-22 nucleotides in length, for example 19-23 nucleotides in length or 21-23 nucleotides in length. Ranges and lengths intermediate to the above recited ranges and lengths are also contemplated to be part of the disclosure.

[0251] In some embodiments, the duplex structure is 19 to 30 base pairs in length. Similarly, the region of complementarity to the target sequence is 19 to 30 nucleotides in length.

[0252] In some embodiments, the dsRNA is about 19 to about 23 nucleotides in length, or about 25 to about 30 nucleotides in length. In general, the dsRNA is long enough to serve as a substrate for the Dicer enzyme. For example, it is well-known in the art that dsRNAs longer than about 21-23 nucleotides in length may serve as substrates for Dicer. As the ordinarily skilled person will also recognize, the region of an RNA targeted for cleavage will most often be part of a larger RNA molecule, often an mRNA molecule. Where relevant, a “part” of an mRNA target is a contiguous sequence of an mRNA target of sufficient length to allow it to be a substrate for RNAi-directed cleavage (i.e., cleavage through a RISC pathway).

[0253] One of skill in the art will also recognize that the duplex region is a primary functional portion of a dsRNA, e.g., a duplex region of about 19 to about 30 base pairs, e.g., about 19-30, 19-29, 19-28, 19-27, 19-26, 19-25, 19-24, 19-23, 19-22, 19-21, 19-20, 20-30, 20-29, 20-28, 20-27, 20-26, 20-25, 20-24, 20-23, 20-22, 20-21, 21-30, 21-29, 21-28, 21-27, 21-26, 21-25, 21-24, 21-23, or 21-22 base pairs. Thus, in one embodiment, to the extent that it becomes processed to a functional duplex, of e.g., 15-30 base pairs, that targets a desired RNA for cleavage, an RNA molecule or complex of RNA molecules having a duplex region greater than 30 base pairs is a dsRNA. Thus, an ordinarily skilled artisan will recognize that in one embodiment, a miRNA is a dsRNA. In another embodiment, a dsRNA is not a naturally occurring miRNA. In another embodiment, an iRNA agent useful to target apolipoprotein C3 gene expression is not generated in the target cell by cleavage of a larger dsRNA.

[0254] A dsRNA as described herein can further include one or more single-stranded nucleotide overhangs e.g., 1-4, 2-4, 1-3, 2-3, 1, 2, 3, or 4 nucleotides. dsRNAs having at least one nucleotide overhang can have superior inhibitory properties relative to their blunt-ended counterparts. A nucleotide overhang can comprise or consist of a nucleotide/nucleoside analog, including a deoxynucleotide/nucleoside. The overhang(s) can be on the sense strand, the antisense strand, or any combination thereof. Furthermore, the nucleotide(s) of an overhang can be present on the 5′-end, 3′-end, or both ends of an antisense or sense strand of a dsRNA.

[0255] A dsRNA can be synthesized by standard methods known in the art. Double stranded RNAi compounds of the invention may be prepared using a two-step procedure. First, the individual strands of the double stranded RNA molecule are prepared separately. Then, the component strands are annealed. The individual strands of the siRNA compound can be prepared using solution-phase or solid-phase organic synthesis or both. Organic synthesis offers the advantage that the oligonucleotide strands comprising unnatural or modified nucleotides can be easily prepared. Similarly, single-stranded oligonucleotides of the invention can be prepared using solution-phase or solid-phase organic synthesis or both.

[0256] In an aspect, a dsRNA of the invention includes at least two nucleotide sequences, a sense sequence and an anti-sense sequence. The sense strand is selected from the group of sequences provided in any one of Tables 2-5, 14, and 15, and the corresponding antisense strand of the sense strand is selected from the group of sequences of any one of Tables 2-5, 14, and 15. In this aspect, one of the two sequences is complementary to the other of the two sequences, with one of the sequences being substantially complementary to a sequence of an mRNA generated in the expression of an apolipoprotein C3 gene. As such, in this aspect, a dsRNA will include two oligonucleotides, where one oligonucleotide is described as the sense strand in any one of Tables 2-5, 14, and 15, and the second oligonucleotide is described as the corresponding antisense strand of the sense strand in any one of Tables 2-5, 14, and 15.

[0257] In certain embodiments, the substantially complementary sequences of the dsRNA are contained on separate oligonucleotides. In other embodiments, the substantially complementary sequences of the dsRNA are contained on a single oligonucleotide.

[0258] In certain embodiments, the sense or antisense strand is selected from the sense or antisense strand of any one of duplexes AD-959917.1; AD-959918.1; AD-960096.1; AD-960064.1; AD-959914.1; AD-959941.1; AD-960031.1; AD-960063.1; AD-960293.1; AD-960288.1; AD-960445.1; AD-960292.1; AD-960475.1; AD-960442.1; AD-960470.1; AD-960436.1; AD-960446.1; AD-960474.1; AD-960294.1; AD-960471.1; AD-960314.1; AD-960443.1; AD-960282.1; AD-960283.1; AD-80794.7; AD-960478.1; AD-960481.1; or AD-960482.1.

[0259] In other embodiments, the sense or antisense strand is selected from the sense or antisense strand of any one of duplexes AD-959917.1; AD-960064.1; AD-960031.1; AD-960063.1; AD-960293.1; AD-960288.1; AD-960445.1; AD-960292.1; AD-960475.1; AD-960442.1; AD-960470.1; AD-960436.1; AD-960446.1; AD-960474.1; AD-960294.1; AD-960443.1; AD-80794.7; and AD-959910.1.

[0260] In some embodiments, the sense or antisense strand is selected from the sense or antisense strand of any one of duplexes AD-80794.8; AD-959907.2; AD-959914.2; AD-959916.2; AD-959932.2; AD-960314.2; AD-959941.2; AD-960030.2; AD-960062.2; AD-960064.2; AD-960065.2; AD-960066.2; AD-960294.2; AD-960471.2; AD-960474.2; AD-960478.2; and AD-960481.2.

[0261] In some embodiments, the sense or antisense strand is selected from the sense or antisense strand of any one of duplexes AD-960030; AD-1143243; AD-1143245; AD-1143247; AD-1143249; AD-1143256; AD-1143260; AD-1143278; AD-1143287; AD-1143295; AD-1143299; AD-1143302; and AD-1143305.

[0262] In some embodiments, the sense or antisense strand is selected from the sense or antisense strand of duplex AD-1143243.

[0263] It will be understood that, although the sequences in Tables 2, 4, and 14 are not described as modified or conjugated sequences, the RNA of the iRNA of the invention e.g., a dsRNA of the invention, may comprise any one of the sequences set forth in any one of Tables 2-5, 14, and 15 that is un-modified, un-conjugated, or modified or conjugated differently than described therein. In other words, the invention encompasses dsRNA of Tables 2-5, 14, and 15 which are un-modified, un-conjugated, modified, or conjugated, as described herein.

[0264] The skilled person is well aware that dsRNAs having a duplex structure of about 20 to 23 base pairs, e.g., 21, base pairs have been hailed as particularly effective in inducing RNA interference (Elbashir et al., EMBO 2001, 20:6877-6888). However, others have found that shorter or longer RNA duplex structures can also be effective (Chu and Rana (2007) RNA 14:1714-1719; Kim et al. (2005) Nat Biotech 23:222-226). In the embodiments described above, by virtue of the nature of the oligonucleotide sequences provided in any one of Tables 2-5, 14, and 15, dsRNAs described herein can include at least one strand of a length of minimally 21 nucleotides. It can be reasonably expected that shorter duplexes having any one of the sequences in any one of Tables 2-5, 14, and 15 minus only a few nucleotides on one or both ends can be similarly effective as compared to the dsRNAs described above. Hence, dsRNAs having a sequence of at least 19, 20, or more contiguous nucleotides derived from any one of the sequences of any one of Tables 2-5, 14, and 15, and differing in their ability to inhibit the expression of an apolipoprotein C3 gene by not more than about 5, 10, 15, 20, 25, or 30% inhibition from a dsRNA comprising the full sequence, are contemplated to be within the scope of the present invention.

[0265] In addition, the RNAs provided in Tables 2-5, 14, and 15 identify a site(s) in a apolipoprotein C3 transcript that is susceptible to RISC-mediated cleavage. As such, the present invention further features iRNAs that target within one of these sites. As used herein, an iRNA is said to target within a particular site of an RNA transcript if the iRNA promotes cleavage of the transcript anywhere within that particular site. Such an iRNA will generally include at least about 19 contiguous nucleotides from any one of the sequences provided in any one of Tables 2-5, 14, and 15 coupled to additional nucleotide sequences taken from the region contiguous to the selected sequence in an apolipoprotein C3 gene.

### III. Modified iRNAs of the Invention

[0266] In certain embodiments, the RNA of the iRNA of the invention e.g., a dsRNA, is un-modified, and does not comprise, e.g., chemical modifications or conjugations known in the art and described herein. In other embodiments, the RNA of an iRNA of the invention, e.g., a dsRNA, is chemically modified to enhance stability or other beneficial characteristics. In certain embodiments of the invention, substantially all of the nucleotides of an iRNA of the invention are modified. In other embodiments of the invention, all of the nucleotides of an iRNA or substantially all of the nucleotides of an iRNA are modified, i.e., not more than 5, 4, 3, 2, or unmodified nucleotides are present in a strand of the iRNA.

[0267] The nucleic acids featured in the invention can be synthesized or modified by methods well established in the art, such as those described in “Current protocols in nucleic acid chemistry,” Beaucage, S. L. et al. (Edrs.), John Wiley & Sons, Inc., New York, NY, USA, which is hereby incorporated herein by reference. Modifications include, for example, end modifications, e.g., 5′-end modifications (phosphorylation, conjugation, inverted linkages) or 3′-end modifications (conjugation, DNA nucleotides, inverted linkages, etc.); base modifications, e.g., replacement with stabilizing bases, destabilizing bases, or bases that base pair with an expanded repertoire of partners, removal of bases (abasic nucleotides), or conjugated bases; sugar modifications (e.g., at the 2′-position or 4′-position) or replacement of the sugar; or backbone modifications, including modification or replacement of the phosphodiester linkages. Specific examples of iRNA compounds useful in the embodiments described herein include, but are not limited to RNAs containing modified backbones or no natural internucleoside linkages. RNAs having modified backbones include, among others, those that do not have a phosphorus atom in the backbone. For the purposes of this specification, and as sometimes referenced in the art, modified RNAs that do not have a phosphorus atom in their internucleoside backbone can also be considered to be oligonucleosides. In some embodiments, a modified iRNA will have a phosphorus atom in its internucleoside backbone.

[0268] Modified RNA backbones include, for example, phosphorothioates, chiral phosphorothioates, phosphorodithioates, phosphotriesters, aminoalkylphosphotriesters, methyl and other alkyl phosphonates including 3′-alkylene phosphonates and chiral phosphonates, phosphinates, phosphoramidates including 3′-amino phosphoramidate and aminoalkylphosphoramidates, thionophosphoramidates, thionoalkylphosphonates, thionoalkylphosphotriesters, and boranophosphates having normal 3′-5′ linkages, 2′-5′-linked analogs of these, and those having inverted polarity wherein the adjacent pairs of nucleoside units are linked 3′-5′ to 5′-3′ or 2′-5′ to 5′-2′. Various salts, mixed salts and free acid forms are also included. In some embodiments of the invention, the dsRNA agents of the invention are in a free acid form. In other embodiments of the invention, the dsRNA agents of the invention are in a salt form. In one embodiment, the dsRNA agents of the invention are in a sodium salt form. In certain embodiments, when the dsRNA agents of the invention are in the sodium salt form, sodium ions are present in the agent as counterions for substantially all of the phosphodiester and/or phosphorothioate groups present in the agent. Agents in which substantially all of the phosphodiester and/or phosphorothioate linkages have a sodium counterion include not more than 5, 4, 3, 2, or 1 phosphodiester and/or phosphorothioate linkages without a sodium counterion. In some embodiments, when the dsRNA agents of the invention are in the sodium salt form, sodium ions are present in the agent as counterions for all of the phosphodiester and/or phosphorothioate groups present in the agent.

[0269] Representative U.S. Patents that teach the preparation of the above phosphorus-containing linkages include, but are not limited to, U.S. Pat. Nos. 3,687,808; 4,469,863; 4,476,301; 5,023,243; 5,177,195; 5,188,897; 5,264,423; 5,276,019; 5,278,302; 5,286,717; 5,321,131; 5,399,676; 5,405,939; 5,453,496; 5,455,233; 5,466,677; 5,476,925; 5,519,126; 5,536,821; 5,541,316; 5,550,111; 5,563,253; 5,571,799; 5,587,361; 5,625,050; 6,028,188; 6,124,445; 6,160,109; 6,169,170; 6,172,209; 6,239,265; 6,277,603; 6,326,199; 6,346,614; 6,444,423; 6,531,590; 6,534,639; 6,608,035; 6,683,167; 6,858,715; 6,867,294; 6,878,805; 7,015,315; 7,041,816; 7,273,933; 7,321,029; and U.S. Pat. RE39464, the entire contents of each of which are hereby incorporated herein by reference.

[0270] Modified RNA backbones that do not include a phosphorus atom therein have backbones that are formed by short chain alkyl or cycloalkyl internucleoside linkages, mixed heteroatoms and alkyl or cycloalkyl internucleoside linkages, or one or more short chain heteroatomic or heterocyclic internucleoside linkages. These include those having morpholino linkages (formed in part from the sugar portion of a nucleoside); siloxane backbones; sulfide, sulfoxide and sulfone backbones; formacetyl and thioformacetyl backbones; methylene formacetyl and thioformacetyl backbones; alkene containing backbones; sulfamate backbones; methyleneimino and methylenehydrazino backbones; sulfonate and sulfonamide backbones; amide backbones; and others having mixed N, O, S, and CH₂ component parts.

[0271] Representative U.S. Patents that teach the preparation of the above oligonucleosides include, but are not limited to, U.S. Pat. Nos. 5,034,506; 5,166,315; 5,185,444; 5,214,134; 5,216,141; 5,235,033; 5,64,562; 5,264,564; 5,405,938; 5,434,257; 5,466,677; 5,470,967; 5,489,677; 5,541,307; 5,561,225; 5,596,086; 5,602,240; 5,608,046; 5,610,289; 5,618,704; 5,623,070; 5,663,312; 5,633,360; 5,677,437; and 5,677,439, the entire contents of each of which are hereby incorporated herein by reference.

[0272] Suitable RNA mimetics are contemplated for use in iRNAs provided herein, in which both the sugar and the internucleoside linkage, i.e., the backbone, of the nucleotide units are replaced with novel groups. The base units are maintained for hybridization with an appropriate nucleic acid target compound. One such oligomeric compound in which an RNA mimetic that has been shown to have excellent hybridization properties is referred to as a peptide nucleic acid (PNA). In PNA compounds, the sugar backbone of an RNA is replaced with an amide containing backbone, in particular an aminoethylglycine backbone. The nucleobases are retained and are bound directly or indirectly to aza nitrogen atoms of the amide portion of the backbone. Representative US patents that teach the preparation of PNA compounds include, but are not limited to, U.S. Pat. Nos. 5,539,082; 5,714,331; and 5,719,262, the entire contents of each of which are hereby incorporated herein by reference. Additional PNA compounds suitable for use in the iRNAs of the invention are described in, for example, in Nielsen et al., Science, 1991, 254, 1497-1500.

[0273] Some embodiments featured in the invention include RNAs with phosphorothioate backbones and oligonucleosides with heteroatom backbones, and in particular —CH₂—NH—CH₂—, —CH₂—N(CH₃)—O—CH₂— [known as a methylene (methylimino) or MMI backbone], —CH₂—O—N(CH₃)—CH₂—, —CH₂—N(CH₃)—N(CH₃)—CH₂— and —N(CH₃)—CH₂—CH₂— [wherein the native phosphodiester backbone is represented as —O—P—O—CH₂— ] of the above-referenced U.S. Pat. No. 5,489,677, and the amide backbones of the above-referenced U.S. Pat. No. 5,602,240. In some embodiments, the RNAs featured herein have morpholino backbone structures of the above-referenced U.S. Pat. No. 5,034,506.

[0274] Modified RNAs can also contain one or more substituted sugar moieties. The iRNAs, e.g., dsRNAs, featured herein can include one of the following at the 2′-position: OH; F; O—, S—, or N-alkyl; O—, S—, or N-alkenyl; O-, S- or N-alkynyl; or O-alkyl-O-alkyl, wherein the alkyl, alkenyl and alkynyl can be substituted or unsubstituted C₁ to C₁₀ alkyl or C₂ to C₁₀ alkenyl and alkynyl. Exemplary suitable modifications include O[(CH₂)ₙO]ₘCH₃, O(CH₂)ₙOCH₃, O(CH₂)ₙNH₂, O(CH₂)ₙCH₃, O(CH₂)ₙONH₂, and O(CH₂)ₙON[(CH₂)ₙCH₃)]₂, where n and m are from 1 to about 10. In other embodiments, dsRNAs include one of the following at the 2′ position: C₁ to C₁₀ lower alkyl, substituted lower alkyl, alkaryl, aralkyl, O-alkaryl or O-aralkyl, SH, SCH₃, OCN, Cl, Br, CN, CF₃, OCF₃, SOCH₃, SO₂CH₃, ONO₂, NO₂, N₃, NH₂, heterocycloalkyl, heterocycloalkaryl, aminoalkylamino, polyalkylamino, substituted silyl, an RNA cleaving group, a reporter group, an intercalator, a group for improving the pharmacokinetic properties of an iRNA, or a group for improving the pharmacodynamic properties of an iRNA, and other substituents having similar properties. In some embodiments, the modification includes a 2′-methoxyethoxy (2′-O—CH₂CH₂OCH₃, also known as 2′-O-(2-methoxyethyl) or 2′-MOE) (Martin et al., Helv. Chim. Acta, 1995, 78:486-504) i.e., an alkoxy-alkoxy group. Another exemplary modification is 2′-dimethylaminooxyethoxy, i.e., a O(CH₂)₂ON(CH₃)₂ group, also known as 2′-DMAOE, as described in examples herein below, and 2′-dimethylaminoethoxyethoxy (also known in the art as 2′-O-dimethylaminoethoxyethyl or 2′-DMAEOE), i.e., 2′-O—CH₂—O—CH₂—N(CH₂)₂. Further exemplary modifications include: 5′-Me-2′-F nucleotides, 5′-Me-2′-OMe nucleotides, 5′-Me-2′-deoxynucleotides, (both R and S isomers in these three families); 2′-alkoxyalkyl; and 2′-NMA (N-methylacetamide).

[0275] Other modifications include 2′-methoxy (2′-OCH₃), 2′-aminopropoxy (2′-OCH₂CH₂CH₂NH₂) and 2′-fluoro (2′-F). Similar modifications can also be made at other positions on the RNA of an iRNA, particularly the 3′ position of the sugar on the 3′ terminal nucleotide or in 2′-5′ linked dsRNAs and the 5′ position of 5′ terminal nucleotide. iRNAs can also have sugar mimetics such as cyclobutyl moieties in place of the pentofuranosyl sugar. Representative US patents that teach the preparation of such modified sugar structures include, but are not limited to, U.S. Pat. Nos. 4,981,957; 5,118,800; 5,319,080; 5,359,044; 5,393,878; 5,446,137; 5,466,786; 5,514,785; 5,519,134; 5,567,811; 5,576,427; 5,591,722; 5,597,909; 5,610,300; 5,627,053; 5,639,873; 5,646,265; 5,658,873; 5,670,633; and 5,700,920, certain of which are commonly owned with the instant application. The entire contents of each of the foregoing are hereby incorporated herein by reference.

[0276] An iRNA can also include nucleobase (often referred to in the art simply as “base”) modifications or substitutions. As used herein, “unmodified” or “natural” nucleobases include the purine bases adenine (A) and guanine (G), and the pyrimidine bases thymine (T), cytosine (C), and uracil (U). Modified nucleobases include other synthetic and natural nucleobases such as deoxy-thymine (dT), 5-methylcytosine (5-me-C), 5-hydroxymethyl cytosine, xanthine, hypoxanthine, 2-aminoadenine, 6-methyl and other alkyl derivatives of adenine and guanine, 2-propyl and other alkyl derivatives of adenine and guanine, 2-thiouracil, 2-thiothymine and 2-thiocytosine, 5-halouracil and cytosine, 5-propynyl uracil and cytosine, 6-azo uracil, cytosine and thymine, 5-uracil (pseudouracil), 4-thiouracil, 8-halo, 8-amino, 8-thiol, 8-thioalkyl, 8-hydroxyl anal other 8-substituted adenines and guanines, 5-halo, particularly 5-bromo, 5-trifluoromethyl and other 5-substituted uracils and cytosines, 7-methylguanine and 7-methyladenine, 8-azaguanine and 8-azaadenine, 7-deazaguanine and 7-daazaadenine and 3-deazaguanine and 3-deazaadenine. Further nucleobases include those disclosed in U.S. Pat. No. 3,687,808, those disclosed in Modified Nucleosides in Biochemistry, Biotechnology and Medicine, Herdewijn, P. ed. Wiley-VCH, 2008; those disclosed in The Concise Encyclopedia Of Polymer Science And Engineering, pages 858-859, Kroschwitz, J. L, ed. John Wiley & Sons, 1990, these disclosed by Englisch et al., Angewandte Chemie, International Edition, 1991, 30, 613, and those disclosed by Sanghvi, Y S., Chapter 15, dsRNA Research and Applications, pages 289-302, Crooke, S. T. and Lebleu, B., Ed., CRC Press, 1993. Certain of these nucleobases are particularly useful for increasing the binding affinity of the oligomeric compounds featured in the invention. These include 5-substituted pyrimidines, 6-azapyrimidines and N-2, N-6 and 0-6 substituted purines, including 2-aminopropyladenine, 5-propynyluracil and 5-propynylcytosine. 5-methylcytosine substitutions have been shown to increase nucleic acid duplex stability by 0.6-1.2° C. (Sanghvi, Y. S., Crooke, S. T. and Lebleu, B., Eds., dsRNA Research and Applications, CRC Press, Boca Raton, 1993, pp. 276-278) and are exemplary base substitutions, even more particularly when combined with 2′-O-methoxyethyl sugar modifications.

[0277] Representative U.S. Patents that teach the preparation of certain of the above noted modified nucleobases as well as other modified nucleobases include, but are not limited to, the above noted U.S. Pat. Nos. 3,687,808, 4,845,205; 5,130,30; 5,134,066; 5,175,273; 5,367,066; 5,432,272; 5,457,187; 5,459,255; 5,484,908; 5,502,177; 5,525,711; 5,552,540; 5,587,469; 5,594,121, 5,596,091; 5,614,617; 5,681,941; 5,750,692; 6,015,886; 6,147,200; 6,166,197; 6,222,025; 6,235,887; 6,380,368; 6,528,640; 6,639,062; 6,617,438; 7,045,610; 7,427,672; and 7,495,088, the entire contents of each of which are hereby incorporated herein by reference.

[0278] The RNA of an iRNA can also be modified to include one or more locked nucleic acids (LNA). A locked nucleic acid is a nucleotide having a modified ribose moiety in which the ribose moiety comprises an extra bridge connecting the 2′ and 4′ carbons. This structure effectively “locks” the ribose in the 3′-endo structural conformation. The addition of locked nucleic acids to siRNAs has been shown to increase siRNA stability in serum, and to reduce off-target effects (Elmen, J. et al., (2005) Nucleic Acids Research 33(1):439-447; Mook, O R. et al., (2007) Mol Canc Ther 6(3):833-843; Grunweller, A. et al., (2003) Nucleic Acids Research 31(12):3185-3193).

[0279] In some embodiments, the RNA of an iRNA can also be modified to include one or more bicyclic sugar moieties. A “bicyclic sugar” is a furanosyl ring modified by the bridging of two atoms. A “bicyclic nucleoside” (“BNA”) is a nucleoside having a sugar moiety comprising a bridge connecting two carbon atoms of the sugar ring, thereby forming a bicyclic ring system. In certain embodiments, the bridge connects the 4′-carbon and the 2′-carbon of the sugar ring. Thus, in some embodiments an agent of the invention may include one or more locked nucleic acids (LNA). A locked nucleic acid is a nucleotide having a modified ribose moiety in which the ribose moiety comprises an extra bridge connecting the 2′ and 4′ carbons. In other words, an LNA is a nucleotide comprising a bicyclic sugar moiety comprising a 4′-CH₂—O-2′ bridge. This structure effectively “locks” the ribose in the 3′-endo structural conformation. The addition of locked nucleic acids to siRNAs has been shown to increase siRNA stability in serum, and to reduce off-target effects (Elmen, J. et al., (2005) Nucleic Acids Research 33(1):439-447; Mook, O R. et al., (2007) Mol Canc Ther 6(3):833-843; Grunweller, A. et al., (2003) Nucleic Acids Research 31(12):3185-3193). Examples of bicyclic nucleosides for use in the polynucleotides of the invention include without limitation nucleosides comprising a bridge between the 4′ and the 2′ ribosyl ring atoms. In certain embodiments, the antisense polynucleotide agents of the invention include one or more bicyclic nucleosides comprising a 4′ to 2′ bridge. Examples of such 4′ to 2′ bridged bicyclic nucleosides, include but are not limited to 4′-(CH₂)—O-2′ (LNA); 4′-(CH₂)—S-2′; 4′-(CH₂)₂—O-2′ (ENA); 4′-CH(CH₃)—O-2′ (also referred to as “constrained ethyl” or “cEt”) and 4′-CH(CH₂OCH₃)—O-2′ (and analogs thereof; see, e.g., U.S. Pat. No. 7,399,845); 4′-C(CH₃)(CH₃)—O-2′ (and analogs thereof; see e.g., U.S. Pat. No. 8,278,283); 4′-CH₂—N(OCH₃)-2′ (and analogs thereof; see e.g., U.S. Pat. No. 8,278,425); 4′-CH₂—O—N(CH₃)-2′ (see, e.g., U.S. Patent Publication No. 2004/0171570); 4′-CH₂—N(R)—O-2′, wherein R is H, C1-C12 alkyl, or a protecting group (see, e.g., U.S. Pat. No. 7,427,672); 4′-CH₂—C(H)(CH₃)-2′ (see, e.g., Chattopadhyaya et al., J. Org. Chem., 2009, 74, 118-134); and 4′-CH₂—C(═CH₂)-2′ (and analogs thereof; see, e.g., U.S. Pat. No. 8,278,426). The entire contents of each of the foregoing are hereby incorporated herein by reference.

[0280] Additional representative U.S. Patents and U.S. Patent Publications that teach the preparation of locked nucleic acid nucleotides include, but are not limited to, the following: U.S. Pat. Nos. 6,268,490; 6,525,191; 6,670,461; 6,770,748; 6,794,499; 6,998,484; 7,053,207; 7,034,133; 7,084,125; 7,399,845; 7,427,672; 7,569,686; 7,741,457; 8,022,193; 8,030,467; 8,278,425; 8,278,426; 8,278,283; US 2008/0039618; and US 2009/0012281, the entire contents of each of which are hereby incorporated herein by reference.

[0281] Any of the foregoing bicyclic nucleosides can be prepared having one or more stereochemical sugar configurations including for example α-L-ribofuranose and β-D-ribofuranose (see WO 99/14226).

[0282] The RNA of an iRNA can also be modified to include one or more constrained ethyl nucleotides. As used herein, a “constrained ethyl nucleotide” or “cEt” is a locked nucleic acid comprising a bicyclic sugar moiety comprising a 4′-CH(CH₃)—O-2′ bridge. In one embodiment, a constrained ethyl nucleotide is in the S conformation referred to herein as “S-cEt.”

[0283] An iRNA of the invention may also include one or more “conformationally restricted nucleotides” (“CRN”). CRN are nucleotide analogs with a linker connecting the C2′ and C4′ carbons of ribose or the C3 and -C5′ carbons of ribose. CRN lock the ribose ring into a stable conformation and increase the hybridization affinity to mRNA. The linker is of sufficient length to place the oxygen in an optimal position for stability and affinity resulting in less ribose ring puckering.

[0284] Representative publications that teach the preparation of certain of the above noted CRN include, but are not limited to, U.S. Patent Publication No. 2013/0190383; and PCT publication WO 2013/036868, the entire contents of each of which are hereby incorporated herein by reference.

[0285] In some embodiments, an iRNA of the invention comprises one or more monomers that are UNA (unlocked nucleic acid) nucleotides. UNA is unlocked acyclic nucleic acid, wherein any of the bonds of the sugar has been removed, forming an unlocked “sugar” residue. In one example, UNA also encompasses monomer with bonds between C1′-C4′ have been removed (i.e. the covalent carbon-oxygen-carbon bond between the C1′ and C4′ carbons). In another example, the C2′-C3′ bond (i.e. the covalent carbon-carbon bond between the C2′ and C3′ carbons) of the sugar has been removed (see Nuc. Acids Symp. Series, 52, 133-134 (2008) and Fluiter et al., Mol. Biosyst., 2009, 10, 1039 hereby incorporated by reference).

[0286] Representative U.S. publications that teach the preparation of UNA include, but are not limited to, U.S. Pat. No. 8,314,227; and U.S. Patent Publication Nos. 2013/0096289; 2013/0011922; and 2011/0313020, the entire contents of each of which are hereby incorporated herein by reference.

[0287] Potentially stabilizing modifications to the ends of RNA molecules can include N-(acetylaminocaproyl)-4-hydroxyprolinol (Hyp-C6-NHAc), N-(caproyl-4-hydroxyprolinol (Hyp-C6), N-(acetyl-4-hydroxyprolinol (Hyp-NHAc), thymidine-2′-O-deoxythymidine (ether), N-(aminocaproyl)-4-hydroxyprolinol (Hyp-C6-amino), 2-docosanoyl-uridine-3″-phosphate, inverted base dT(idT) and others. Disclosure of this modification can be found in PCT Publication No. WO 2011/005861.

[0288] Other modifications of the nucleotides of an iRNA of the invention include a 5′ phosphate or 5′ phosphate mimic, e.g., a 5′-terminal phosphate or phosphate mimic on the antisense strand of an iRNA. Suitable phosphate mimics are disclosed in, for example U.S. Patent Publication No. 2012/0157511, the entire contents of which are incorporated herein by reference.

A. Modified iRNAs Comprising Motifs of the Invention

[0289] In certain aspects of the invention, the double stranded RNA agents of the invention include agents with chemical modifications as disclosed, for example, in WO2013/075035, the entire contents of each of which are incorporated herein by reference. WO2013/075035 provides motifs of three identical modifications on three consecutive nucleotides into a sense strand or antisense strand of a dsRNAi agent, particularly at or near the cleavage site. In some embodiments, the sense strand and antisense strand of the dsRNAi agent may otherwise be completely modified. The introduction of these motifs interrupts the modification pattern, if present, of the sense or antisense strand. The dsRNAi agent may be optionally conjugated with a GalNAc derivative ligand, for instance on the sense strand.

[0290] More specifically, when the sense strand and antisense strand of the double stranded RNA agent are completely modified to have one or more motifs of three identical modifications on three consecutive nucleotides at or near the cleavage site of at least one strand of a dsRNAi agent, the gene silencing activity of the dsRNAi agent was observed.

[0291] Accordingly, the invention provides double stranded RNA agents capable of inhibiting the expression of a target gene (i.e., APOC3 gene) in vivo. The RNAi agent comprises a sense strand and an antisense strand. Each strand of the RNAi agent may be, for example, 17-30 nucleotides in length, 25-30 nucleotides in length, 27-30 nucleotides in length, 19-25 nucleotides in length, 19-23 nucleotides in length, 19-21 nucleotides in length, 21-25 nucleotides in length, or 21-23 nucleotides in length.

[0292] The sense strand and antisense strand typically form a duplex double stranded RNA (“dsRNA”), also referred to herein as “dsRNAi agent.” The duplex region of a dsRNAi agent may be, for example, the duplex region can be 27-30 nucleotide pairs in length, 19-25 nucleotide pairs in length, 19-23 nucleotide pairs in length, 19-21 nucleotide pairs in length, 21-25 nucleotide pairs in length, or 21-23 nucleotide pairs in length. In another example, the duplex region is selected from 19, 20, 21, 22, 23, 24, 25, 26, and 27 nucleotides in length.

[0293] In certain embodiments, the dsRNAi agent may contain one or more overhang regions or capping groups at the 3′-end, 5′-end, or both ends of one or both strands. The overhang can be, independently, 1-6 nucleotides in length, for instance 2-6 nucleotides in length, 1-5 nucleotides in length, 2-5 nucleotides in length, 1-4 nucleotides in length, 2-4 nucleotides in length, 1-3 nucleotides in length, 2-3 nucleotides in length, or 1-2 nucleotides in length. In certain embodiments, the overhang regions can include extended overhang regions as provided above. The overhangs can be the result of one strand being longer than the other, or the result of two strands of the same length being staggered. The overhang can form a mismatch with the target mRNA or it can be complementary to the gene sequences being targeted or can be another sequence. The first and second strands can also be joined, e.g., by additional bases to form a hairpin, or by other non-base linkers.

[0294] In certain embodiments, the nucleotides in the overhang region of the dsRNAi agent can each independently be a modified or unmodified nucleotide including, but no limited to 2′-sugar modified, such as, 2′-F, 2′-O-methyl, thymidine (T), 2′-O-methoxyethyl-5-methyluridine (Teo), 2′-O-methoxyethyladenosine (Aeo), 2′-O-methoxyethyl-5-methylcytidine (m5Ceo), and any combinations thereof.

[0295] For example, TT can be an overhang sequence for either end on either strand. The overhang can form a mismatch with the target mRNA or it can be complementary to the gene sequences being targeted or can be another sequence.

[0296] The 5′- or 3′-overhangs at the sense strand, antisense strand, or both strands of the dsRNAi agent may be phosphorylated. In some embodiments, the overhang region(s) contains two nucleotides having a phosphorothioate between the two nucleotides, where the two nucleotides can be the same or different. In some embodiments, the overhang is present at the 3′-end of the sense strand, antisense strand, or both strands. In some embodiments, this 3′-overhang is present in the antisense strand. In some embodiments, this 3′-overhang is present in the sense strand.

[0297] The dsRNAi agent may contain only a single overhang, which can strengthen the interference activity of the RNAi, without affecting its overall stability. For example, the single-stranded overhang may be located at the 3′-end of the sense strand or, alternatively, at the 3′-end of the antisense strand. The RNAi may also have a blunt end, located at the 5′-end of the antisense strand (or the 3′-end of the sense strand) or vice versa. Generally, the antisense strand of the dsRNAi agent has a nucleotide overhang at the 3′-end, and the 5′-end is blunt. While not wishing to be bound by theory, the asymmetric blunt end at the 5′-end of the antisense strand and 3′-end overhang of the antisense strand favor the guide strand loading into RISC process.

[0298] In certain embodiments, the dsRNAi agent is a double ended bluntmer of 19 nucleotides in length, wherein the sense strand contains at least one motif of three 2′-F modifications on three consecutive nucleotides at positions 7, 8, 9 from the 5′end. The antisense strand contains at least one motif of three 2′-O-methyl modifications on three consecutive nucleotides at positions 11, 12, 13 from the 5′end.

[0299] In other embodiments, the dsRNAi agent is a double ended bluntmer of 20 nucleotides in length, wherein the sense strand contains at least one motif of three 2′-F modifications on three consecutive nucleotides at positions 8, 9, 10 from the 5′end. The antisense strand contains at least one motif of three 2′-O-methyl modifications on three consecutive nucleotides at positions 11, 12, 13 from the 5′end.

[0300] In yet other embodiments, the dsRNAi agent is a double ended bluntmer of 21 nucleotides in length, wherein the sense strand contains at least one motif of three 2′-F modifications on three consecutive nucleotides at positions 9, 10, 11 from the 5′end. The antisense strand contains at least one motif of three 2′-O-methyl modifications on three consecutive nucleotides at positions 11, 12, 13 from the 5′end.

[0301] In certain embodiments, the dsRNAi agent comprises a 21 nucleotide sense strand and a 23 nucleotide antisense strand, wherein the sense strand contains at least one motif of three 2′-F modifications on three consecutive nucleotides at positions 9, 10, 11 from the 5′end; the antisense strand contains at least one motif of three 2′-O-methyl modifications on three consecutive nucleotides at positions 11, 12, 13 from the 5′end, wherein one end of the RNAi agent is blunt, while the other end comprises a 2 nucleotide overhang. Preferably, the 2 nucleotide overhang is at the 3′-end of the antisense strand.

[0302] When the 2 nucleotide overhang is at the 3′-end of the antisense strand, there may be two phosphorothioate internucleotide linkages between the terminal three nucleotides, wherein two of the three nucleotides are the overhang nucleotides, and the third nucleotide is a paired nucleotide next to the overhang nucleotide. In one embodiment, the RNAi agent additionally has two phosphorothioate internucleotide linkages between the terminal three nucleotides at both the 5′-end of the sense strand and at the 5′-end of the antisense strand. In certain embodiments, every nucleotide in the sense strand and the antisense strand of the dsRNAi agent, including the nucleotides that are part of the motifs are modified nucleotides. In certain embodiments each residue is independently modified with a 2′-O-methyl or 3′-fluoro, e.g., in an alternating motif. Optionally, the dsRNAi agent further comprises a ligand (preferably GalNAc₃).

[0303] In certain embodiments, the dsRNAi agent comprises a sense and an antisense strand, wherein the sense strand is 25-30 nucleotide residues in length, wherein starting from the 5′ terminal nucleotide (position 1) positions 1 to 23 of the first strand comprise at least 8 ribonucleotides; the antisense strand is 36-66 nucleotide residues in length and, starting from the 3′ terminal nucleotide, comprises at least 8 ribonucleotides in the positions paired with positions 1-23 of sense strand to form a duplex; wherein at least the 3′ terminal nucleotide of antisense strand is unpaired with sense strand, and up to 6 consecutive 3′ terminal nucleotides are unpaired with sense strand, thereby forming a 3′ single stranded overhang of 1-6 nucleotides; wherein the 5′ terminus of antisense strand comprises from 10-30 consecutive nucleotides which are unpaired with sense strand, thereby forming a 10-30 nucleotide single stranded 5′ overhang; wherein at least the sense strand 5′ terminal and 3′ terminal nucleotides are base paired with nucleotides of antisense strand when sense and antisense strands are aligned for maximum complementarity, thereby forming a substantially duplexed region between sense and antisense strands; and antisense strand is sufficiently complementary to a target RNA along at least 19 ribonucleotides of antisense strand length to reduce target gene expression when the double stranded nucleic acid is introduced into a mammalian cell; and wherein the sense strand contains at least one motif of three 2′-F modifications on three consecutive nucleotides, where at least one of the motifs occurs at or near the cleavage site. The antisense strand contains at least one motif of three 2′-O-methyl modifications on three consecutive nucleotides at or near the cleavage site.

[0304] In certain embodiments, the dsRNAi agent comprises sense and antisense strands, wherein the dsRNAi agent comprises a first strand having a length which is at least 25 and at most 29 nucleotides and a second strand having a length which is at most 30 nucleotides with at least one motif of three 2′-O-methyl modifications on three consecutive nucleotides at position 11, 12, 13 from the 5′ end; wherein the 3′ end of the first strand and the 5′ end of the second strand form a blunt end and the second strand is 1-4 nucleotides longer at its 3′ end than the first strand, wherein the duplex region which is at least 25 nucleotides in length, and the second strand is sufficiently complementary to a target mRNA along at least 19 nucleotide of the second strand length to reduce target gene expression when the RNAi agent is introduced into a mammalian cell, and wherein Dicer cleavage of the dsRNAi agent preferentially results in an siRNA comprising the 3′-end of the second strand, thereby reducing expression of the target gene in the mammal. Optionally, the dsRNAi agent further comprises a ligand.

[0305] In certain embodiments, the sense strand of the dsRNAi agent contains at least one motif of three identical modifications on three consecutive nucleotides, where one of the motifs occurs at the cleavage site in the sense strand.

[0306] In certain embodiments, the antisense strand of the dsRNAi agent can also contain at least one motif of three identical modifications on three consecutive nucleotides, where one of the motifs occurs at or near the cleavage site in the antisense strand.

[0307] For a dsRNAi agent having a duplex region of 19-23 nucleotides in length, the cleavage site of the antisense strand is typically around the 10, 11, and 12 positions from the 5′-end. Thus the motifs of three identical modifications may occur at the 9, 10, 11 positions; the 10, 11, 12 positions; the 11, 12, 13 positions; the 12, 13, 14 positions; or the 13, 14, 15 positions of the antisense strand, the count starting from the first nucleotide from the 5′-end of the antisense strand, or, the count starting from the first paired nucleotide within the duplex region from the 5′-end of the antisense strand. The cleavage site in the antisense strand may also change according to the length of the duplex region of the dsRNAi agent from the 5′-end.

[0308] The sense strand of the dsRNAi agent may contain at least one motif of three identical modifications on three consecutive nucleotides at the cleavage site of the strand; and the antisense strand may have at least one motif of three identical modifications on three consecutive nucleotides at or near the cleavage site of the strand. When the sense strand and the antisense strand form a dsRNA duplex, the sense strand and the antisense strand can be so aligned that one motif of the three nucleotides on the sense strand and one motif of the three nucleotides on the antisense strand have at least one nucleotide overlap, i.e., at least one of the three nucleotides of the motif in the sense strand forms a base pair with at least one of the three nucleotides of the motif in the antisense strand. Alternatively, at least two nucleotides may overlap, or all three nucleotides may overlap.

[0309] In some embodiments, the sense strand of the dsRNAi agent may contain more than one motif of three identical modifications on three consecutive nucleotides. The first motif may occur at or near the cleavage site of the strand and the other motifs may be a wing modification. The term “wing modification” herein refers to a motif occurring at another portion of the strand that is separated from the motif at or near the cleavage site of the same strand. The wing modification is either adjacent to the first motif or is separated by at least one or more nucleotides. When the motifs are immediately adjacent to each other then the chemistries of the motifs are distinct from each other, and when the motifs are separated by one or more nucleotide than the chemistries can be the same or different. Two or more wing modifications may be present. For instance, when two wing modifications are present, each wing modification may occur at one end relative to the first motif which is at or near cleavage site or on either side of the lead motif.

[0310] Like the sense strand, the antisense strand of the dsRNAi agent may contain more than one motifs of three identical modifications on three consecutive nucleotides, with at least one of the motifs occurring at or near the cleavage site of the strand. This antisense strand may also contain one or more wing modifications in an alignment similar to the wing modifications that may be present on the sense strand.

[0311] In some embodiments, the wing modification on the sense strand or antisense strand of the dsRNAi agent typically does not include the first one or two terminal nucleotides at the 3′-end, 5′-end, or both ends of the strand.

[0312] In other embodiments, the wing modification on the sense strand or antisense strand of the dsRNAi agent typically does not include the first one or two paired nucleotides within the duplex region at the 3′-end, 5′-end, or both ends of the strand.

[0313] When the sense strand and the antisense strand of the dsRNAi agent each contain at least one wing modification, the wing modifications may fall on the same end of the duplex region, and have an overlap of one, two, or three nucleotides.

[0314] When the sense strand and the antisense strand of the dsRNAi agent each contain at least two wing modifications, the sense strand and the antisense strand can be so aligned that two modifications each from one strand fall on one end of the duplex region, having an overlap of one, two, or three nucleotides; two modifications each from one strand fall on the other end of the duplex region, having an overlap of one, two or three nucleotides; two modifications one strand fall on each side of the lead motif, having an overlap of one, two or three nucleotides in the duplex region.

[0315] In some embodiments, every nucleotide in the sense strand and antisense strand of the dsRNAi agent, including the nucleotides that are part of the motifs, may be modified. Each nucleotide may be modified with the same or different modification which can include one or more alteration of one or both of the non-linking phosphate oxygens or of one or more of the linking phosphate oxygens; alteration of a constituent of the ribose sugar, e.g., of the 2′-hydroxyl on the ribose sugar; wholesale replacement of the phosphate moiety with “dephospho” linkers; modification or replacement of a naturally occurring base; and replacement or modification of the ribose-phosphate backbone.

[0316] As nucleic acids are polymers of subunits, many of the modifications occur at a position which is repeated within a nucleic acid, e.g., a modification of a base, or a phosphate moiety, or a non-linking O of a phosphate moiety. In some cases the modification will occur at all of the subject positions in the nucleic acid but in many cases it will not. By way of example, a modification may only occur at a 3′- or 5′ terminal position, may only occur in a terminal region, e.g., at a position on a terminal nucleotide or in the last 2, 3, 4, 5, or 10 nucleotides of a strand. A modification may occur in a double strand region, a single strand region, or in both. A modification may occur only in the double strand region of an RNA or may only occur in a single strand region of a RNA. For example, a phosphorothioate modification at a non-linking O position may only occur at one or both termini, may only occur in a terminal region, e.g., at a position on a terminal nucleotide or in the last 2, 3, 4, 5, or 10 nucleotides of a strand, or may occur in double strand and single strand regions, particularly at termini. The 5′-end or ends can be phosphorylated.

[0317] It may be possible, e.g., to enhance stability, to include particular bases in overhangs, or to include modified nucleotides or nucleotide surrogates, in single strand overhangs, e.g., in a 5′- or 3′-overhang, or in both. For example, it can be desirable to include purine nucleotides in overhangs. In some embodiments all or some of the bases in a 3′- or 5′-overhang may be modified, e.g., with a modification described herein. Modifications can include, e.g., the use of modifications at the 2′ position of the ribose sugar with modifications that are known in the art, e.g., the use of deoxyribonucleotides, 2′-deoxy-2′-fluoro (2′-F) or 2′-O-methyl modified instead of the ribosugar of the nucleobase, and modifications in the phosphate group, e.g., phosphorothioate modifications. Overhangs need not be homologous with the target sequence.

[0318] In some embodiments, each residue of the sense strand and antisense strand is independently modified with LNA, CRN, cET, UNA, HNA, CeNA, 2′-methoxyethyl, 2′-O-methyl, 2′-O-allyl, 2′-C-allyl, 2′-deoxy, 2′-hydroxyl, or 2′-fluoro. The strands can contain more than one modification. In one embodiment, each residue of the sense strand and antisense strand is independently modified with 2′-O-methyl or 2′-fluoro.

[0319] At least two different modifications are typically present on the sense strand and antisense strand. Those two modifications may be the 2′-O-methyl or 2′-fluoro modifications, or others.

[0320] In certain embodiments, the Nₐ or N_{b} comprise modifications of an alternating pattern. The term “alternating motif” as used herein refers to a motif having one or more modifications, each modification occurring on alternating nucleotides of one strand. The alternating nucleotide may refer to one per every other nucleotide or one per every three nucleotides, or a similar pattern. For example, if A, B and C each represent one type of modification to the nucleotide, the alternating motif can be “ABABABABABAB . . . ,” “AABBAABBAABB . . . ,” “AABAABAABAAB . . . ,” “AAABAAABAAAB . . . ,” “AAABBBAAABBB . . . ,” or “ABCABCABCABC . . . ,” etc.

[0321] The type of modifications contained in the alternating motif may be the same or different. For example, if A, B, C, D each represent one type of modification on the nucleotide, the alternating pattern, i.e., modifications on every other nucleotide, may be the same, but each of the sense strand or antisense strand can be selected from several possibilities of modifications within the alternating motif such as “ABABAB . . . ”, “ACACAC . . . ” “BDBDBD . . . ” or “CDCDCD . . . ,” etc.

[0322] In some embodiments, the dsRNAi agent of the invention comprises the modification pattern for the alternating motif on the sense strand relative to the modification pattern for the alternating motif on the antisense strand is shifted. The shift may be such that the modified group of nucleotides of the sense strand corresponds to a differently modified group of nucleotides of the antisense strand and vice versa. For example, the sense strand when paired with the antisense strand in the dsRNA duplex, the alternating motif in the sense strand may start with “ABABAB” from 5′ to 3′ of the strand and the alternating motif in the antisense strand may start with “BABABA” from 5′ to 3′ of the strand within the duplex region. As another example, the alternating motif in the sense strand may start with “AABBAABB” from 5′ to 3′ of the strand and the alternating motif in the antisense strand may start with “BBAABBAA” from 5′ to 3′ of the strand within the duplex region, so that there is a complete or partial shift of the modification patterns between the sense strand and the antisense strand.

[0323] In some embodiments, the dsRNAi agent comprises the pattern of the alternating motif of 2′-O-methyl modification and 2′-F modification on the sense strand initially has a shift relative to the pattern of the alternating motif of 2′-O-methyl modification and 2′-F modification on the antisense strand initially, i.e., the 2′-O-methyl modified nucleotide on the sense strand base pairs with a 2′-F modified nucleotide on the antisense strand and vice versa. The 1 position of the sense strand may start with the 2′-F modification, and the 1 position of the antisense strand may start with the 2′-O-methyl modification.

[0324] The introduction of one or more motifs of three identical modifications on three consecutive nucleotides to the sense strand or antisense strand interrupts the initial modification pattern present in the sense strand or antisense strand. This interruption of the modification pattern of the sense or antisense strand by introducing one or more motifs of three identical modifications on three consecutive nucleotides to the sense or antisense strand may enhance the gene silencing activity against the target gene.

[0325] In some embodiments, when the motif of three identical modifications on three consecutive nucleotides is introduced to any of the strands, the modification of the nucleotide next to the motif is a different modification than the modification of the motif. For example, the portion of the sequence containing the motif is “ . . . NₐYYYN_{b} . . . ,” where “Y” represents the modification of the motif of three identical modifications on three consecutive nucleotide, and “Nₐ” and “N_{b}” represent a modification to the nucleotide next to the motif “YYY” that is different than the modification of Y, and where Nₐ and N_{b} can be the same or different modifications. Alternatively, Nₐ or N_{b} may be present or absent when there is a wing modification present.

[0326] The iRNA may further comprise at least one phosphorothioate or methylphosphonate internucleotide linkage. The phosphorothioate or methylphosphonate internucleotide linkage modification may occur on any nucleotide of the sense strand, antisense strand, or both strands in any position of the strand. For instance, the internucleotide linkage modification may occur on every nucleotide on the sense strand or antisense strand; each internucleotide linkage modification may occur in an alternating pattern on the sense strand or antisense strand; or the sense strand or antisense strand may contain both internucleotide linkage modifications in an alternating pattern. The alternating pattern of the internucleotide linkage modification on the sense strand may be the same or different from the antisense strand, and the alternating pattern of the internucleotide linkage modification on the sense strand may have a shift relative to the alternating pattern of the internucleotide linkage modification on the antisense strand. In one embodiment, a double-stranded RNAi agent comprises 6-8 phosphorothioate internucleotide linkages. In some embodiments, the antisense strand comprises two phosphorothioate internucleotide linkages at the 5′-end and two phosphorothioate internucleotide linkages at the 3′-end, and the sense strand comprises at least two phosphorothioate internucleotide linkages at either the 5′-end or the 3′-end.

[0327] In some embodiments, the dsRNAi agent comprises a phosphorothioate or methylphosphonate internucleotide linkage modification in the overhang region. For example, the overhang region may contain two nucleotides having a phosphorothioate or methylphosphonate internucleotide linkage between the two nucleotides. Internucleotide linkage modifications also may be made to link the overhang nucleotides with the terminal paired nucleotides within the duplex region. For example, at least 2, 3, 4, or all the overhang nucleotides may be linked through phosphorothioate or methylphosphonate internucleotide linkage, and optionally, there may be additional phosphorothioate or methylphosphonate internucleotide linkages linking the overhang nucleotide with a paired nucleotide that is next to the overhang nucleotide. For instance, there may be at least two phosphorothioate internucleotide linkages between the terminal three nucleotides, in which two of the three nucleotides are overhang nucleotides, and the third is a paired nucleotide next to the overhang nucleotide. These terminal three nucleotides may be at the 3′-end of the antisense strand, the 3′-end of the sense strand, the 5′-end of the antisense strand, or the 5′end of the antisense strand.

[0328] In some embodiments, the 2-nucleotide overhang is at the 3′-end of the antisense strand, and there are two phosphorothioate internucleotide linkages between the terminal three nucleotides, wherein two of the three nucleotides are the overhang nucleotides, and the third nucleotide is a paired nucleotide next to the overhang nucleotide. Optionally, the dsRNAi agent may additionally have two phosphorothioate internucleotide linkages between the terminal three nucleotides at both the 5′-end of the sense strand and at the 5′-end of the antisense strand.

[0329] In one embodiment, the dsRNAi agent comprises mismatch(es) with the target, within the duplex, or combinations thereof. The mismatch may occur in the overhang region or the duplex region. The base pair may be ranked on the basis of their propensity to promote dissociation or melting (e.g., on the free energy of association or dissociation of a particular pairing, the simplest approach is to examine the pairs on an individual pair basis, though next neighbor or similar analysis can also be used). In terms of promoting dissociation: A:U is preferred over G:C; G:U is preferred over G:C; and I:C is preferred over G:C (I=inosine). Mismatches, e.g., non-canonical or other than canonical pairings (as described elsewhere herein) are preferred over canonical (A:T, A:U, G:C) pairings; and pairings which include a universal base are preferred over canonical pairings.

[0330] In certain embodiments, the dsRNAi agent comprises at least one of the first 1, 2, 3, 4, or 5 base pairs within the duplex regions from the 5′-end of the antisense strand independently selected from the group of: A:U, G:U, I:C, and mismatched pairs, e.g., non-canonical or other than canonical pairings or pairings which include a universal base, to promote the dissociation of the antisense strand at the 5′-end of the duplex.

[0331] In certain embodiments, the nucleotide at the 1 position within the duplex region from the 5′-end in the antisense strand is selected from A, dA, dU, U, and dT. Alternatively, at least one of the first 1, 2, or 3 base pair within the duplex region from the 5′-end of the antisense strand is an AU base pair. For example, the first base pair within the duplex region from the 5′-end of the antisense strand is an AU base pair.

[0332] In other embodiments, the nucleotide at the 3′-end of the sense strand is deoxy-thymine (dT) or the nucleotide at the 3′-end of the antisense strand is deoxy-thymine (dT). For example, there is a short sequence of deoxy-thymine nucleotides, for example, two dT nucleotides on the 3′-end of the sense, antisense strand, or both strands.

[0333] In certain embodiments, the sense strand sequence may be represented by formula (I):

(I)
5′ nₚ-Nₐ-(X X X )ᵢ-N_{b}-Y Y Y-N_{b}-(Z Z Z)ⱼ-Nₐ-n_{q} 3′

[0334] wherein:
[0335] i and j are each independently 0 or 1;
[0336] p and q are each independently 0-6;
[0337] each Nₐ independently represents an oligonucleotide sequence comprising 0-25 modified nucleotides, each sequence comprising at least two differently modified nucleotides;
[0338] each N_{b} independently represents an oligonucleotide sequence comprising 0-10 modified nucleotides;
[0339] each nₚ and n_{q} independently represent an overhang nucleotide;
[0340] wherein Nb and Y do not have the same modification; and
[0341] XXX, YYY, and ZZZ each independently represent one motif of three identical modifications on three consecutive nucleotides. Preferably YYY is all 2′-F modified nucleotides.

[0342] In some embodiments, the Nₐ or N_{b} comprises modifications of alternating pattern.

[0343] In some embodiments, the YYY motif occurs at or near the cleavage site of the sense strand. For example, when the dsRNAi agent has a duplex region of 17-23 nucleotides in length, the YYY motif can occur at or the vicinity of the cleavage site (e.g.: can occur at positions 6, 7, 8; 7, 8, 9; 8, 9, 10; 9, 10, 11; 10, 11,12; or 11, 12, 13) of the sense strand, the count starting from the first nucleotide, from the 5′-end; or optionally, the count starting at the first paired nucleotide within the duplex region, from the 5′-end.

[0344] In one embodiment, i is 1 and j is 0, or i is 0 and j is 1, or both i and j are 1. The sense strand can therefore be represented by the following formulas:

(Ib)
5′ nₚ-Nₐ-YYY-N_{b}-ZZZ-Nₐ-n_{q} 3′;
(Ic)
5′ nₚ-Nₐ-XXX-N_{b}-YYY-Nₐ-n_{q} 3′;
or
(Id)
5′ nₚ-Nₐ-XXX-N_{b}-YYY-N_{b}-ZZZ-Nₐ-n_{q} 3′.

[0345] When the sense strand is represented by formula (Ib), N_{b} represents an oligonucleotide sequence comprising 0-10, 0-7, 0-5, 0-4, 0-2, or 0 modified nucleotides. Each Nₐ independently can represent an oligonucleotide sequence comprising 2-20, 2-15, or 2-10 modified nucleotides.

[0346] When the sense strand is represented as formula (Ic), N_{b} represents an oligonucleotide sequence comprising 0-10, 0-7, 0-10, 0-7, 0-5, 0-4, 0-2, or 0 modified nucleotides. Each Nₐ can independently represent an oligonucleotide sequence comprising 2-20, 2-15, or 2-10 modified nucleotides.

[0347] When the sense strand is represented as formula (Id), each N_{b} independently represents an oligonucleotide sequence comprising 0-10, 0-7, 0-5, 0-4, 0-2, or 0 modified nucleotides. Preferably, N_{b} is 0, 1, 2, 3, 4, 5, or 6 Each Nₐ can independently represent an oligonucleotide sequence comprising 2-20, 2-15, or 2-10 modified nucleotides.

[0348] Each of X, Y and Z may be the same or different from each other.

[0349] In other embodiments, i is 0 and j is 0, and the sense strand may be represented by the formula:

(Ia)
5′ nₚ-Nₐ-YYY-Nₐ-n_{q} 3′.

[0350] When the sense strand is represented by formula (Ia), each Nₐ independently can represent an oligonucleotide sequence comprising 2-20, 2-15, or 2-10 modified nucleotides.

[0351] In one embodiment, the antisense strand sequence of the RNAi may be represented by formula (II):

(II)
5′ n_{q′}-Nₐ′-(Z′Z′Z′)ₖ-N_{b}′-Y′Y′Y′-N_{b}′-(X′X′X′)ₗ-N′ₐ-
nₚ′ 3′

[0352] wherein:
[0353] k and 1 are each independently 0 or 1;
[0354] p′ and q′ are each independently 0-6;
[0355] each Nₐ′ independently represents an oligonucleotide sequence comprising 0-25 modified nucleotides, each sequence comprising at least two differently modified nucleotides;
[0356] each N_{b}′ independently represents an oligonucleotide sequence comprising 0-10 modified nucleotides;
[0357] each nₚ′ and n_{q}′ independently represent an overhang nucleotide;
[0358] wherein N_{b}′ and Y′ do not have the same modification; and
[0359] X′X′X′, Y′Y′Y′, and Z′Z′Z′ each independently represent one motif of three identical modifications on three consecutive nucleotides.

[0360] In some embodiments, the Nₐ′ or N_{b}′ comprises modifications of alternating pattern.

[0361] The Y′Y′Y′ motif occurs at or near the cleavage site of the antisense strand. For example, when the dsRNAi agent has a duplex region of 17-23 nucleotides in length, the Y′Y′Y′ motif can occur at positions 9, 10, 11; 10, 11, 12; 11, 12, 13; 12, 13, 14; or 13, 14, 15 of the antisense strand, with the count starting from the first nucleotide, from the 5′-end; or optionally, the count starting at the first paired nucleotide within the duplex region, from the 5′-end. Preferably, the Y′Y′Y′ motif occurs at positions 11, 12, 13.

[0362] In certain embodiments, Y′Y′Y′ motif is all 2′-OMe modified nucleotides.

[0363] In certain embodiments, k is 1 and 1 is 0, or k is 0 and 1 is 1, or both k and 1 are 1.

[0364] The antisense strand can therefore be represented by the following formulas:

(IIb)
5′ n_{q′}-Nₐ′-Z′Z′Z′-N_{b}′-Y′Y′Y′-Nₐ′-nₚ′ 3′;
(IIc)
5′ n_{q′}-Nₐ′-Y′Y′Y′-N_{b}′-X′X′X′-nₚ′ 3′;
or
(IId)
5′ n_{q′}-Nₐ′-Z′Z′Z′-N_{b}′-Y′Y′Y′-N_{b}′-X′X′X′-Nₐ′-n_{p′} 3′.

[0365] When the antisense strand is represented by formula (IIb), N_{b}′ represents an oligonucleotide sequence comprising 0-10, 0-7, 0-10, 0-7, 0-5, 0-4, 0-2, or 0 modified nucleotides. Each Nₐ′ independently represents an oligonucleotide sequence comprising 2-20, 2-15, or 2-10 modified nucleotides.

[0366] When the antisense strand is represented as formula (IIc), N_{b}′ represents an oligonucleotide sequence comprising 0-10, 0-7, 0-10, 0-7, 0-5, 0-4, 0-2, or 0 modified nucleotides. Each Nₐ′ independently represents an oligonucleotide sequence comprising 2-20, 2-15, or 2-10 modified nucleotides.

[0367] When the antisense strand is represented as formula (IId), each N_{b}′ independently represents an oligonucleotide sequence comprising 0-10, 0-7, 0-10, 0-7, 0-5, 0-4, 0-2, or 0 modified nucleotides. Each Nₐ′ independently represents an oligonucleotide sequence comprising 2-20, 2-15, or 2-10 modified nucleotides. Preferably, N_{b} is 0, 1, 2, 3, 4, 5, or 6.

[0368] In other embodiments, k is 0 and 1 is 0 and the antisense strand may be represented by the formula:

(Ia)
5′ n_{p′}-N_{a′}-Y′Y′Y′-N_{a′}-n_{q′} 3′.

[0369] When the antisense strand is represented as formula (IIa), each Nₐ′ independently represents an oligonucleotide sequence comprising 2-20, 2-15, or 2-10 modified nucleotides. Each of X′, Y′ and Z′ may be the same or different from each other.

[0370] Each nucleotide of the sense strand and antisense strand may be independently modified with LNA, CRN, UNA, cEt, HNA, CeNA, 2′-methoxyethyl, 2′-O-methyl, 2′-O-allyl, 2′-C-allyl, 2′-hydroxyl, or 2′-fluoro. For example, each nucleotide of the sense strand and antisense strand is independently modified with 2′-O-methyl or 2′-fluoro. Each X, Y, Z, X′, Y′, and Z′, in particular, may represent a 2′-O-methyl modification or a 2′-fluoro modification.

[0371] In some embodiments, the sense strand of the dsRNAi agent may contain YYY motif occurring at 9, 10, and 11 positions of the strand when the duplex region is 21 nt, the count starting from the first nucleotide from the 5′-end, or optionally, the count starting at the first paired nucleotide within the duplex region, from the 5′-end; and Y represents 2′-F modification. The sense strand may additionally contain XXX motif or ZZZ motifs as wing modifications at the opposite end of the duplex region; and XXX and ZZZ each independently represents a 2′-OMe modification or 2′-F modification.

[0372] In some embodiments the antisense strand may contain Y′Y′Y′ motif occurring at positions 11, 12, 13 of the strand, the count starting from the first nucleotide from the 5′-end, or optionally, the count starting at the first paired nucleotide within the duplex region, from the 5′-end; and Y′ represents 2′-O-methyl modification. The antisense strand may additionally contain X′X′X′ motif or Z′Z′Z′ motifs as wing modifications at the opposite end of the duplex region; and X′X′X′ and Z′Z′Z′ each independently represents a 2′-OMe modification or 2′-F modification.

[0373] The sense strand represented by any one of the above formulas (Ia), (Ib), (Ic), and (Id) forms a duplex with an antisense strand being represented by any one of formulas (IIa), (IIb), (IIc), and (IId), respectively.

[0374] Accordingly, the dsRNAi agents for use in the methods of the invention may comprise a sense strand and an antisense strand, each strand having 14 to 30 nucleotides, the iRNA duplex represented by formula (III):

(III)
sense:
5′ nₚ-Nₐ-(X X X)ᵢ -N_{b}-Y Y Y-N_{b}-(Z Z Z)ⱼ-Nₐ-n_{q} 3′
antisense:
3′ nₚ^{′}-Nₐ^{′}-(X′X′X′)ₖ-N_{b}^{′}-Y′Y′Y′-N_{b}^{′}-(Z′Z′Z′)ₗ-Nₐ^{′}-n_{q}^{′} 5′

[0375] wherein:
[0376] i, j, k, and l are each independently 0 or 1;
[0377] p, p′, q, and q′ are each independently 0-6;
[0378] each Nₐ and Nₐ′ independently represents an oligonucleotide sequence comprising 0-25 modified nucleotides, each sequence comprising at least two differently modified nucleotides;
[0379] each N_{b} and N_{b}′ independently represents an oligonucleotide sequence comprising 0-10 modified nucleotides;
[0380] wherein each nₚ′, nₚ, n_{q}′, and n_{q}, each of which may or may not be present, independently represents an overhang nucleotide; and
[0381] XXX, YYY, ZZZ, X′X′X′, Y′Y′Y′, and Z′Z′Z′ each independently represent one motif of three identical modifications on three consecutive nucleotides.

[0382] In one embodiment, i is 0 and j is 0; or i is 1 and j is 0; or i is 0 and j is 1; or both i and j are 0; or both i and j are 1. In another embodiment, k is 0 and 1 is 0; or k is 1 and 1 is 0; k is 0 and 1 is 1; or both k and 1 are 0; or both k and 1 are 1.

[0383] Exemplary combinations of the sense strand and antisense strand forming an iRNA duplex include the formulas below:

(IIIa)
5′ nₚ-Nₐ-Y Y Y-Nₐ-n_{q} 3′
3′ nₚ^{′}-Nₐ^{′}-Y′Y′Y′-Nₐ^{′}n_{q}^{′} 5′
(IIIb)
5′ nₚ-Nₐ-Y Y Y-N_{b}-Z Z Z-Nₐ-n_{q} 3′
3′ nₚ^{′}-Nₐ^{′}-Y′Y′Y′-N_{b}^{′}-Z′Z′Z′-Nₐ^{′}n_{q}^{′} 5′
(IIIc)
5′ nₚ-Nₐ-X X X-N_{b}-Y Y Y-Nₐ-n_{q} 3′
3′ nₚ^{′}-Nₐ^{′}-X′X′X′-N_{b}^{′}-Y′Y′Y′-Nₐ^{′}-n_{q}^{′} 5′
(IIId)
5′ nₚ-Nₐ-X X X-N_{b}-Y Y Y-N_{b}-Z Z Z-Nₐ-n_{q} 3′
3′ nₚ^{′}-Nₐ^{′}-X′X′X′-N_{b}^{′}-Y′Y′Y′-N_{b}^{′}-Z′Z′Z′-Nₐ^{′}-n_{q}^{′} 5′

[0384] When the dsRNAi agent is represented by formula (IIIa), each Nₐ independently represents an oligonucleotide sequence comprising 2-20, 2-15, or 2-10 modified nucleotides.

[0385] When the dsRNAi agent is represented by formula (IIIb), each N_{b} independently represents an oligonucleotide sequence comprising 1-10, 1-7, 1-5, or 1-4 modified nucleotides. Each Nₐ independently represents an oligonucleotide sequence comprising 2-20, 2-15, or 2-10 modified nucleotides.

[0386] When the dsRNAi agent is represented as formula (IIIc), each N_{b}, N_{b}′ independently represents an oligonucleotide sequence comprising 0-10, 0-7, 0-10, 0-7, 0-5, 0-4, 0-2, or 0 modified nucleotides. Each Nₐ independently represents an oligonucleotide sequence comprising 2-20, 2-15, or 2-10 modified nucleotides.

[0387] When the dsRNAi agent is represented as formula (IIId), each N_{b}, N_{b}′ independently represents an oligonucleotide sequence comprising 0-10, 0-7, 0-10, 0-7, 0-5, 0-4, 0-2, or 0 modified nucleotides. Each Nₐ, Nₐ′ independently represents an oligonucleotide sequence comprising 2-20, 2-15, or 2-10 modified nucleotides. Each of Nₐ, Nₐ′, N_{b}, and N_{b}′ independently comprises modifications of alternating pattern.

[0388] Each of X, Y, and Z in formulas (III), (IIIa), (IIIb), (IIIc), and (IIId) may be the same or different from each other.

[0389] When the dsRNAi agent is represented by formula (III), (IIIa), (IIIb), (IIIc), and (IIId), at least one of the Y nucleotides may form a base pair with one of the Y′ nucleotides. Alternatively, at least two of the Y nucleotides form base pairs with the corresponding Y′ nucleotides; or all three of the Y nucleotides all form base pairs with the corresponding Y′ nucleotides.

[0390] When the dsRNAi agent is represented by formula (IIIb) or (IIId), at least one of the Z nucleotides may form a base pair with one of the Z′ nucleotides. Alternatively, at least two of the Z nucleotides form base pairs with the corresponding Z′ nucleotides; or all three of the Z nucleotides all form base pairs with the corresponding Z′ nucleotides.

[0391] When the dsRNAi agent is represented as formula (IIIc) or (IIId), at least one of the X nucleotides may form a base pair with one of the X′ nucleotides. Alternatively, at least two of the X nucleotides form base pairs with the corresponding X′ nucleotides; or all three of the X nucleotides all form base pairs with the corresponding X′ nucleotides.

[0392] In certain embodiments, the modification on the Y nucleotide is different than the modification on the Y′ nucleotide, the modification on the Z nucleotide is different than the modification on the Z′ nucleotide, or the modification on the X nucleotide is different than the modification on the X′ nucleotide.

[0393] In certain embodiments, when the dsRNAi agent is represented by formula (IIId), the Nₐ modifications are 2′-O-methyl or 2′-fluoro modifications. In other embodiments, when the RNAi agent is represented by formula (IIId), the Nₐ modifications are 2′-O-methyl or 2′-fluoro modifications and nₚ′>0 and at least one nₚ′ is linked to a neighboring nucleotide a via phosphorothioate linkage. In yet other embodiments, when the RNAi agent is represented by formula (IIId), the Nₐ modifications are 2′-O-methyl or 2′-fluoro modifications, nₚ′>0 and at least one nₚ′ is linked to a neighboring nucleotide via phosphorothioate linkage, and the sense strand is conjugated to one or more GalNAc derivatives attached through a bivalent or trivalent branched linker (described below). In other embodiments, when the RNAi agent is represented by formula (IIId), the Nₐ modifications are 2′-O-methyl or 2′-fluoro modifications, nₚ′>0 and at least one nₚ′ is linked to a neighboring nucleotide via phosphorothioate linkage, the sense strand comprises at least one phosphorothioate linkage, and the sense strand is conjugated to one or more GalNAc derivatives attached through a bivalent or trivalent branched linker.

[0394] In some embodiments, when the dsRNAi agent is represented by formula (IIIa), the Nₐ modifications are 2′-O-methyl or 2′-fluoro modifications, nₚ′>0 and at least one nₚ′ is linked to a neighboring nucleotide via phosphorothioate linkage, the sense strand comprises at least one phosphorothioate linkage, and the sense strand is conjugated to one or more GalNAc derivatives attached through a bivalent or trivalent branched linker.

[0395] In some embodiments, the dsRNAi agent is a multimer containing at least two duplexes represented by formula (III), (IIIa), (IIIb), (IIIc), and (IIId), wherein the duplexes are connected by a linker. The linker can be cleavable or non-cleavable. Optionally, the multimer further comprises a ligand. Each of the duplexes can target the same gene or two different genes; or each of the duplexes can target same gene at two different target sites.

[0396] In some embodiments, the dsRNAi agent is a multimer containing three, four, five, six, or more duplexes represented by formula (III), (IIIa), (IIIb), (IIIc), and (IIId), wherein the duplexes are connected by a linker. The linker can be cleavable or non-cleavable. Optionally, the multimer further comprises a ligand. Each of the duplexes can target the same gene or two different genes; or each of the duplexes can target same gene at two different target sites.

[0397] In one embodiment, two dsRNAi agents represented by at least one of formulas (III), (IIIa), (IIIb), (IIIc), and (IIId) are linked to each other at the 5′ end, and one or both of the 3′ ends, and are optionally conjugated to a ligand. Each of the agents can target the same gene or two different genes; or each of the agents can target same gene at two different target sites.

[0398] In certain embodiments, an RNAi agent of the invention may contain a low number of nucleotides containing a 2′-fluoro modification, e.g., 10 or fewer nucleotides with 2′-fluoro modification. For example, the RNAi agent may contain 10, 9, 8, 7, 6, 5, 4, 3, 2, 1 or 0 nucleotides with a 2′-fluoro modification. In a specific embodiment, the RNAi agent of the invention contains 10 nucleotides with a 2′-fluoro modification, e.g., 4 nucleotides with a 2′-fluoro modification in the sense strand and 6 nucleotides with a 2′-fluoro modification in the antisense strand. In another specific embodiment, the RNAi agent of the invention contains 6 nucleotides with a 2′-fluoro modification, e.g., 4 nucleotides with a 2′-fluoro modification in the sense strand and 2 nucleotides with a 2′-fluoro modification in the antisense strand.

[0399] In other embodiments, an RNAi agent of the invention may contain an ultra low number of nucleotides containing a 2′-fluoro modification, e.g., 2 or fewer nucleotides containing a 2′-fluoro modification. For example, the RNAi agent may contain 2, 1 of 0 nucleotides with a 2′-fluoro modification. In a specific embodiment, the RNAi agent may contain 2 nucleotides with a 2′-fluoro modification, e.g., 0 nucleotides with a 2-fluoro modification in the sense strand and 2 nucleotides with a 2′-fluoro modification in the antisense strand.

[0400] Various publications describe multimeric iRNAs that can be used in the methods of the invention. Such publications include WO2007/091269, U.S. Pat. No. 7,858,769, WO2010/141511, WO2007/117686, WO2009/014887, and WO2011/031520 the entire contents of each of which are hereby incorporated herein by reference.

[0401] In certain embodiments, the compositions and methods of the disclosure include a vinyl phosphonate (VP) modification of an RNAi agent as described herein. In exemplary embodiments, a vinyl phosphonate of the disclosure has the following structure:

[chemical structure]

A vinyl phosphonate of the instant disclosure may be attached to either the antisense or the sense strand of a dsRNA of the disclosure. In certain preferred embodiments, a vinyl phosphonate of the instant disclosure is attached to the antisense strand of a dsRNA, optionally at the 5′ end of the antisense strand of the dsRNA.

[0402] Vinyl phosphate modifications are also contemplated for the compositions and methods of the instant disclosure. An exemplary vinyl phosphate structure is:

[chemical structure]

[0403] As described in more detail below, the iRNA that contains conjugations of one or more carbohydrate moieties to an iRNA can optimize one or more properties of the iRNA. In many cases, the carbohydrate moiety will be attached to a modified subunit of the iRNA. For example, the ribose sugar of one or more ribonucleotide subunits of a iRNA can be replaced with another moiety, e.g., a non-carbohydrate (preferably cyclic) carrier to which is attached a carbohydrate ligand. A ribonucleotide subunit in which the ribose sugar of the subunit has been so replaced is referred to herein as a ribose replacement modification subunit (RRMS). A cyclic carrier may be a carbocyclic ring system, i.e., all ring atoms are carbon atoms, or a heterocyclic ring system, i.e., one or more ring atoms may be a heteroatom, e.g., nitrogen, oxygen, sulfur. The cyclic carrier may be a monocyclic ring system, or may contain two or more rings, e.g. fused rings. The cyclic carrier may be a fully saturated ring system, or it may contain one or more double bonds.

[0404] The ligand may be attached to the polynucleotide via a carrier. The carriers include (i) at least one “backbone attachment point,” preferably two “backbone attachment points” and (ii) at least one “tethering attachment point.” A “backbone attachment point” as used herein refers to a functional group, e.g. a hydroxyl group, or generally, a bond available for, and that is suitable for incorporation of the carrier into the backbone, e.g., the phosphate, or modified phosphate, e.g., sulfur containing, backbone, of a ribonucleic acid. A “tethering attachment point” (TAP) in some embodiments refers to a constituent ring atom of the cyclic carrier, e.g., a carbon atom or a heteroatom (distinct from an atom which provides a backbone attachment point), that connects a selected moiety. The moiety can be, e.g., a carbohydrate, e.g. monosaccharide, disaccharide, trisaccharide, tetrasaccharide, oligosaccharide, or polysaccharide. Optionally, the selected moiety is connected by an intervening tether to the cyclic carrier. Thus, the cyclic carrier will often include a functional group, e.g., an amino group, or generally, provide a bond, that is suitable for incorporation or tethering of another chemical entity, e.g., a ligand to the constituent ring.

[0405] The iRNA may be conjugated to a ligand via a carrier, wherein the carrier can be cyclic group or acyclic group; preferably, the cyclic group is selected from pyrrolidinyl, pyrazolinyl, pyrazolidinyl, imidazolinyl, imidazolidinyl, piperidinyl, piperazinyl, [1,3]dioxolane, oxazolidinyl, isoxazolidinyl, morpholinyl, thiazolidinyl, isothiazolidinyl, quinoxalinyl, pyridazinonyl, tetrahydrofuryl, and decalin; preferably, the acyclic group is a serinol backbone or diethanolamine backbone.

i. Thermally Destabilizing Modifications

[0406] In certain embodiments, a dsRNA molecule can be optimized for RNA interference by incorporating thermally destabilizing modifications in the seed region of the antisense strand (i.e., at positions 2-9 of the 5′-end of the antisense strand) to reduce or inhibit off-target gene silencing. It has been discovered that dsRNAs with an antisense strand comprising at least one thermally destabilizing modification of the duplex within the first 9 nucleotide positions, counting from the 5′ end, of the antisense strand have reduced off-target gene silencing activity. Accordingly, in some embodiments, the antisense strand comprises at least one (e.g., one, two, three, four, five or more) thermally destabilizing modification of the duplex within the first 9 nucleotide positions of the 5′ region of the antisense strand. In some embodiments, one or more thermally destabilizing modification(s) of the duplex is/are located in positions 2-9, or preferably positions 4-8, from the 5′-end of the antisense strand. In some further embodiments, the thermally destabilizing modification(s) of the duplex is/are located at position 6, 7 or 8 from the 5′-end of the antisense strand. In still some further embodiments, the thermally destabilizing modification of the duplex is located at position 7 from the 5′-end of the antisense strand. The term “thermally destabilizing modification(s)” includes modification(s) that would result with a dsRNA with a lower overall melting temperature (Tm) (preferably a Tm with one, two, three or four degrees lower than the Tm of the dsRNA without having such modification(s). In some embodiments, the thermally destabilizing modification of the duplex is located at position 2, 3, 4, 5 or 9 from the 5′-end of the antisense strand.

[0407] An iRNA agent comprises a sense strand and an antisense strand, each strand having 14 to 40 nucleotides. The RNAi agent may be represented by formula (L):

[chemical structure]

In formula (L), B1, B2, B3, B1′, B2′, B3′, and B4′ each are independently a nucleotide containing a modification selected from the group consisting of 2′-O-alkyl, 2′-substituted alkoxy, 2′-substituted alkyl, 2′-halo, ENA, and BNA/LNA. In one embodiment, B1, B2, B3, B1′, B2′, B3′, and B4′ each contain 2′-OMe modifications. In one embodiment, B1, B2, B3, B1′, B2′, B3′, and B4′ each contain 2′-OMe or 2′-F modifications. In one embodiment, at least one of B1, B2, B3, B1′, B2′, B3′, and B4′ contain 2′-O—N-methylacetamido (2′-O-NMA) modification.

[0408] C1 is a thermally destabilizing nucleotide placed at a site opposite to the seed region of the antisense strand (i.e., at positions 2-8 of the 5′-end of the antisense strand). For example, C1 is at a position of the sense strand that pairs with a nucleotide at positions 2-8 of the 5′-end of the antisense strand. In one example, C1 is at position 15 from the 5′-end of the sense strand. C1 nucleotide bears the thermally destabilizing modification which can include abasic modification; mismatch with the opposing nucleotide in the duplex; and sugar modification such as 2′-deoxy modification or acyclic nucleotide e.g., unlocked nucleic acids (UNA) or glycerol nucleic acid (GNA). In one embodiment, C1 has thermally destabilizing modification selected from the group consisting of: i) mismatch with the opposing nucleotide in the antisense strand; ii) abasic modification selected from the group consisting of:

[chemical structure]

and iii) sugar modification selected from the group consisting of:

[chemical structure]

wherein B is a modified or unmodified nucleobase, R¹ and R² independently are H, halogen, OR₃, or alkyl; and R₃ is H, alkyl, cycloalkyl, aryl, aralkyl, heteroaryl or sugar. In one embodiment, the thermally destabilizing modification in C1 is a mismatch selected from the group consisting of G:G, G:A, G:U, G:T, A:A, A:C, C:C, C:U, C:T, U:U, T:T, and U:T; and optionally, at least one nucleobase in the mismatch pair is a 2′-deoxy nucleobase. In one example, the thermally destabilizing modification in C1 is GNA or

[chemical structure]

T1, T1′, T2′, and T3′ each independently represent a nucleotide comprising a modification providing the nucleotide a steric bulk that is less or equal to the steric bulk of a 2′-OMe modification. A steric bulk refers to the sum of steric effects of a modification. Methods for determining steric effects of a modification of a nucleotide are known to one skilled in the art. The modification can be at the 2′ position of a ribose sugar of the nucleotide, or a modification to a non-ribose nucleotide, acyclic nucleotide, or the backbone of the nucleotide that is similar or equivalent to the 2′ position of the ribose sugar, and provides the nucleotide a steric bulk that is less than or equal to the steric bulk of a 2′-OMe modification. For example, T1, T1′, T2′, and T3′ are each independently selected from DNA, RNA, LNA, 2′-F, and 2′-F-5′-methyl. In one embodiment, T1 is DNA. In one embodiment, T1′ is DNA, RNA or LNA. In one embodiment, T2′ is DNA or RNA. In one embodiment, T3′ is DNA or RNA.
n¹, n³, and q¹ are independently 4 to 15 nucleotides in length.
n⁵, q³, and q⁷ are independently 1-6 nucleotide(s) in length.
n⁴, q², and q⁶ are independently 1-3 nucleotide(s) in length; alternatively, n⁴ is 0.
q⁵ is independently 0-10 nucleotide(s) in length.
n² and q⁴ are independently 0-3 nucleotide(s) in length.

[0409] Alternatively, n⁴ is 0-3 nucleotide(s) in length.

[0410] In one embodiment, n⁴ can be 0. In one example, n⁴ is 0, and q² and q⁶ are 1. In another example, n⁴ is 0, and q² and q⁶ are 1, with two phosphorothioate internucleotide linkage modifications within position 1-5 of the sense strand (counting from the 5′-end of the sense strand), and two phosphorothioate internucleotide linkage modifications at positions 1 and 2 and two phosphorothioate internucleotide linkage modifications within positions 18-23 of the antisense strand (counting from the 5′-end of the antisense strand).

[0411] In one embodiment, n⁴, q², and q⁶ are each 1.

[0412] In one embodiment, n², n⁴, q², q⁴, and q⁶ are each 1.

[0413] In one embodiment, C1 is at position 14-17 of the 5′-end of the sense strand, when the sense strand is 19-22 nucleotides in length, and n⁴ is 1. In one embodiment, C1 is at position 15 of the 5′-end of the sense strand

[0414] In one embodiment, T3′ starts at position 2 from the 5′ end of the antisense strand. In one example, T3′ is at position 2 from the 5′ end of the antisense strand and q⁶ is equal to 1.

[0415] In one embodiment, T1′ starts at position 14 from the 5′ end of the antisense strand. In one example, T1′ is at position 14 from the 5′ end of the antisense strand and q² is equal to 1.

[0416] In an exemplary embodiment, T3′ starts from position 2 from the 5′ end of the antisense strand and T1′ starts from position 14 from the 5′ end of the antisense strand. In one example, T3′ starts from position 2 from the 5′ end of the antisense strand and q⁶ is equal to 1 and T1′ starts from position 14 from the 5′ end of the antisense strand and q² is equal to 1.

[0417] In one embodiment, T1′ and T3′ are separated by 11 nucleotides in length (i.e. not counting the T1′ and T3′ nucleotides).

[0418] In one embodiment, T1′ is at position 14 from the 5′ end of the antisense strand. In one example, T1′ is at position 14 from the 5′ end of the antisense strand and q² is equal to 1, and the modification at the 2′ position or positions in a non-ribose, acyclic or backbone that provide less steric bulk than a 2′-OMe ribose.

[0419] In one embodiment, T3′ is at position 2 from the 5′ end of the antisense strand. In one example, T3′ is at position 2 from the 5′ end of the antisense strand and q⁶ is equal to 1, and the modification at the 2′ position or positions in a non-ribose, acyclic or backbone that provide less than or equal to steric bulk than a 2′-OMe ribose.

[0420] In one embodiment, T1 is at the cleavage site of the sense strand. In one example, T1 is at position 11 from the 5′ end of the sense strand, when the sense strand is 19-22 nucleotides in length, and n² is 1. In an exemplary embodiment, T1 is at the cleavage site of the sense strand at position 11 from the 5′ end of the sense strand, when the sense strand is 19-22 nucleotides in length, and n² is 1,

[0421] In one embodiment, T2′ starts at position 6 from the 5′ end of the antisense strand. In one example, T2′ is at positions 6-10 from the 5′ end of the antisense strand, and q⁴ is 1.

[0422] In an exemplary embodiment, T1 is at the cleavage site of the sense strand, for instance, at position 11 from the 5′ end of the sense strand, when the sense strand is 19-22 nucleotides in length, and n² is 1; T1′ is at position 14 from the 5′ end of the antisense strand, and q² is equal to 1, and the modification to T1′ is at the 2′ position of a ribose sugar or at positions in a non-ribose, acyclic or backbone that provide less steric bulk than a 2′-OMe ribose; T2′ is at positions 6-10 from the 5′ end of the antisense strand, and q⁴ is 1; and T3′ is at position 2 from the 5′ end of the antisense strand, and q⁶ is equal to 1, and the modification to T3′ is at the 2′ position or at positions in a non-ribose, acyclic or backbone that provide less than or equal to steric bulk than a 2′-OMe ribose.

In one embodiment, T2′ starts at position 8 from the 5′ end of the antisense strand. In one example, T2′ starts at position 8 from the 5′ end of the antisense strand, and q⁴ is 2.

[0423] In one embodiment, T2′ starts at position 9 from the 5′ end of the antisense strand. In one example, T2′ is at position 9 from the 5′ end of the antisense strand, and q⁴ is 1.

[0424] In one embodiment, B1′ is 2′-OMe or 2′-F, q¹ is 9, T1′ is 2′-F, q² is 1, B2′ is 2′-OMe or 2′-F, q³ is 4, T2′ is 2′-F, q⁴ is 1, B3′ is 2′-OMe or 2′-F, q⁵ is 6, T3′ is 2′-F, q⁶ is 1, B4′ is 2′-OMe, and q⁷ is 1; with two phosphorothioate internucleotide linkage modifications within positions 1-5 of the sense strand (counting from the 5′-end of the sense strand), and two phosphorothioate internucleotide linkage modifications at positions 1 and 2 and two phosphorothioate internucleotide linkage modifications within positions 18-23 of the antisense strand (counting from the 5′-end of the antisense strand).

[0425] In one embodiment, n⁴ is 0, B3 is 2′-OMe, n⁵ is 3, B1′ is 2′-OMe or 2′-F, q¹ is 9, T1′ is 2′-F, q² is 1, B2′ is 2′-OMe or 2′-F, q³ is 4, T2′ is 2′-F, q⁴ is 1, B3 is 2′-OMe or 2′-F, q⁵ is 6, T3 is 2′-F, q⁶ is 1, B4′ is 2′-OMe, and q⁷ is 1; with two phosphorothioate internucleotide linkage modifications within positions 1-5 of the sense strand (counting from the 5′-end of the sense strand), and two phosphorothioate internucleotide linkage modifications at positions 1 and 2 and two phosphorothioate internucleotide linkage modifications within positions 18-23 of the antisense strand (counting from the 5′-end of the antisense strand).

[0426] In one embodiment, B1 is 2′-OMe or 2′-F, n¹ is 8, T1 is 2′F, n² is 3, B2 is 2′-OMe, n³ is 7, n⁴ is 0, B3 is 2′OMe, n⁵ is 3, B1′ is 2′-OMe or 2′-F, q¹ is 9, T1′ is 2′-F, q² is 1, B2′ is 2′-OMe or 2′-F, q³ is 4, T2′ is 2′-F, q⁴ is 2, B3′ is 2′-OMe or 2′-F, q⁵ is 5, T3′ is 2′-F, q⁶ is 1, B4′ is 2′-OMe, and q⁷ is 1.

In one embodiment, B1 is 2′-OMe or 2′-F, n¹ is 8, T1 is 2′F, n² is 3, B2 is 2′-OMe, n³ is 7, n⁴ is 0, B3 is 2′-OMe, n⁵ is 3, B1′ is 2′-OMe or 2′-F, q¹ is 9, T1′ is 2′-F, q² is 1, B2′ is 2′-OMe or 2′-F, q³ is 4, T2′ is 2′-F, q⁴ is 2, B3′ is 2′-OMe or 2′-F, q⁵ is 5, T3′ is 2′-F, q⁶ is 1, B4′ is 2′-OMe, and q⁷ is 1; with two phosphorothioate internucleotide linkage modifications within positions 1-5 of the sense strand (counting from the 5′-end of the sense strand), and two phosphorothioate internucleotide linkage modifications at positions 1 and 2 and two phosphorothioate internucleotide linkage modifications within positions 18-23 of the antisense strand (counting from the 5′-end of the antisense strand).

[0427] In one embodiment, B1 is 2′-OMe or 2′-F, n¹ is 6, T1 is 2′F, n² is 3, B2 is 2′-OMe, n³ is 7, n⁴ is 0, B3 is 2′OMe, n⁵ is 3, B1′ is 2′-OMe or 2′-F, q is 7, T1′ is 2′-F, q² is 1, B2′ is 2′-OMe or 2′-F, q³ is 4, T2′ is 2′-F, q⁴ is 2, B3′ is 2′-OMe or 2′-F, q⁵ is 5, T3′ is 2′-F, q⁶ is 1, B4′ is 2′-OMe, and q⁷ is 1.

In one embodiment, B1 is 2′-OMe or 2′-F, n¹ is 6, T1 is 2′F, n² is 3, B2 is 2′-OMe, n³ is 7, n⁴ is 0, B3 is 2′-OMe, n⁵ is 3, B1′ is 2′-OMe or 2′-F, q¹ is 7, T1′ is 2′-F, q² is 1, B2′ is 2′-OMe or 2′-F, q³ is 4, T2′ is 2′-F, q⁴ is 2, B3′ is 2′-OMe or 2′-F, q⁵ is 5, T3′ is 2′-F, q⁶ is 1, B4′ is 2′-OMe, and q⁷ is 1; with two phosphorothioate internucleotide linkage modifications within positions 1-5 of the sense strand (counting from the 5′-end of the sense strand), and two phosphorothioate internucleotide linkage modifications at positions 1 and 2 and two phosphorothioate internucleotide linkage modifications within positions 18-23 of the antisense strand (counting from the 5′-end of the antisense strand).

[0428] In one embodiment, B1 is 2′-OMe or 2′-F, n¹ is 8, T1 is 2′F, n² is 3, B2 is 2′-OMe, n³ is 7, n⁴ is 0, B3 is 2′OMe, n⁵ is 3, B1′ is 2′-OMe or 2′-F, q¹ is 9, T1′ is 2′-F, q² is 1, B2′ is 2′-OMe or 2′-F, q³ is 4, T2′ is 2′-F, q⁴ is 1, B3′ is 2′-OMe or 2′-F, q⁵ is 6, T3′ is 2′-F, q⁶ is 1, B4′ is 2′-OMe, and q⁷ is 1.

In one embodiment, B1 is 2′-OMe or 2′-F, n¹ is 8, T1 is 2′F, n² is 3, B2 is 2′-OMe, n³ is 7, n⁴ is 0, B3 is 2′-OMe, n⁵ is 3, B1′ is 2′-OMe or 2′-F, q¹ is 9, T1′ is 2′-F, q² is 1, B2′ is 2′-OMe or 2′-F, q³ is 4, T2′ is 2′-F, q⁴ is 1, B3′ is 2′-OMe or 2′-F, q⁵ is 6, T3′ is 2′-F, q⁶ is 1, B4′ is 2′-OMe, and q⁷ is 1; with two phosphorothioate internucleotide linkage modifications within positions 1-5 of the sense strand (counting from the 5′-end of the sense strand), and two phosphorothioate internucleotide linkage modifications at positions 1 and 2 and two phosphorothioate internucleotide linkage modifications within positions 18-23 of the antisense strand (counting from the 5′-end of the antisense strand).

[0429] In one embodiment, B1 is 2′-OMe or 2′-F, n¹ is 8, T1 is 2′F, n² is 3, B2 is 2′-OMe, n³ is 7, n⁴ is 0, B3 is 2′OMe, n⁵ is 3, B1′ is 2′-OMe or 2′-F, q¹ is 9, T1′ is 2′-F, q² is 1, B2′ is 2′-OMe or 2′-F, q³ is 5, T2′ is 2′-F, q⁴ is 1, B3′ is 2′-OMe or 2′-F, q⁵ is 5, T3′ is 2′-F, q⁶ is 1, B4′ is 2′-OMe, and q⁷ is 1; optionally with at least 2 additional TT at the 3′-end of the antisense strand.

In one embodiment, B1 is 2′-OMe or 2′-F, n¹ is 8, T1 is 2′F, n² is 3, B2 is 2′-OMe, n³ is 7, n⁴ is 0, B3 is 2′-OMe, n⁵ is 3, B1′ is 2′-OMe or 2′-F, q¹ is 9, T1′ is 2′-F, q² is 1, B2′ is 2′-OMe or 2′-F, q³ is 5, T2′ is 2′-F, q⁴ is 1, B3′ is 2′-OMe or 2′-F, q⁵ is 5, T3′ is 2′-F, q⁶ is 1, B4′ is 2′-OMe, and q⁷ is 1; optionally with at least 2 additional TT at the 3′-end of the antisense strand; with two phosphorothioate internucleotide linkage modifications within positions 1-5 of the sense strand (counting from the 5′-end of the sense strand), and two phosphorothioate internucleotide linkage modifications at positions 1 and 2 and two phosphorothioate internucleotide linkage modifications within positions 18-23 of the antisense strand (counting from the 5′-end of the antisense strand).

[0430] In one embodiment, B1 is 2′-OMe or 2′-F, n¹ is 8, T1 is 2′F, n² is 3, B2 is 2′-OMe, n³ is 7, n⁴ is 0, B3 is 2′-OMe, n⁵ is 3, B1′ is 2′-OMe or 2′-F, q¹ is 9, T1′ is 2′-F, q² is 1, B2′ is 2′-OMe or 2′-F, q³ is 4, q⁴ is 0, B3′ is 2′-OMe or 2′-F, q⁵ is 7, T3′ is 2′-F, q⁶ is 1, B4′ is 2′-OMe, and q⁷ is 1.

In one embodiment, B1 is 2′-OMe or 2′-F, n¹ is 8, T1 is 2′F, n² is 3, B2 is 2′-OMe, n³ is 7, n⁴ is 0, B3 is 2′-OMe, n⁵ is 3, B1′ is 2′-OMe or 2′-F, q¹ is 9, T1′ is 2′-F, q² is 1, B2′ is 2′-OMe or 2′-F, q³ is 4, q⁴ is 0, B3′ is 2′-OMe or 2′-F, q⁵ is 7, T3′ is 2′-F, q⁶ is 1, B4′ is 2′-OMe, and q⁷ is 1; with two phosphorothioate internucleotide linkage modifications within positions 1-5 of the sense strand (counting from the 5′-end), and two phosphorothioate internucleotide linkage modifications at positions 1 and 2 and two phosphorothioate internucleotide linkage modifications within positions 18-23 of the antisense strand (counting from the 5′-end).

[0431] In one embodiment, B1 is 2′-OMe or 2′-F, n¹ is 8, T1 is 2′F, n² is 3, B2 is 2′-OMe, n³ is 7, n⁴ is 0, B3 is 2′OMe, n⁵ is 3, B1′ is 2′-OMe or 2′-F, q¹ is 9, T1′ is 2′-F, q² is 1, B2′ is 2′-OMe or 2′-F, q³ is 4, T2′ is 2′-F, q⁴ is 2, B3′ is 2′-OMe or 2′-F, q⁵ is 5, T3′ is 2′-F, q⁶ is 1, B4′ is 2′-F, and q⁷ is 1. In one embodiment, B1 is 2′-OMe or 2′-F, n¹ is 8, T1 is 2′F, n² is 3, B2 is 2′-OMe, n³ is 7, n⁴ is 0, B3 is 2′-OMe, n⁵ is 3, B1′ is 2′-OMe or 2′-F, q¹ is 9, T1′ is 2′-F, q² is 1, B2′ is 2′-OMe or 2′-F, q³ is 4, T2′ is 2′-F, q⁴ is 2, B3′ is 2′-OMe or 2′-F, q⁵ is 5, T3′ is 2′-F, q⁶ is 1, B4′ is 2′-F, and q⁷ is 1; with two phosphorothioate internucleotide linkage modifications within positions 1-5 of the sense strand (counting from the 5′-end of the sense strand), and two phosphorothioate internucleotide linkage modifications at positions 1 and 2 and two phosphorothioate internucleotide linkage modifications within positions 18-23 of the antisense strand (counting from the 5′-end of the antisense strand).

[0432] In one embodiment, B1 is 2′-OMe or 2′-F, n¹ is 8, T1 is 2′F, n² is 3, B2 is 2′-OMe, n³ is 7, n⁴ is 0, B3 is 2′-OMe, n⁵ is 3, B1′ is 2′-OMe or 2′-F, q¹ is 9, T1′ is 2′-F, q² is 1, B2′ is 2′-OMe or 2′-F, q³ is 4, q⁴ is 0, B3′ is 2′-OMe or 2′-F, q⁵ is 7, T3′ is 2′-F, q⁶ is 1, B4′ is 2′-F, and q⁷ is 1.

In one embodiment, B1 is 2′-OMe or 2′-F, n¹ is 8, T1 is 2′F, n² is 3, B2 is 2′-OMe, n³ is 7, n⁴ is 0, B3 is 2′-OMe, n⁵ is 3, B1′ is 2′-OMe or 2′-F, q¹ is 9, T1′ is 2′-F, q² is 1, B2′ is 2′-OMe or 2′-F, q³ is 4, q⁴ is 0, B3′ is 2′-OMe or 2′-F, q⁵ is 7, T3′ is 2′-F, q⁶ is 1, B4′ is 2′-F, and q⁷ is 1; with two phosphorothioate internucleotide linkage modifications within positions 1-5 of the sense strand (counting from the 5′-end of the sense strand), and two phosphorothioate internucleotide linkage modifications at positions 1 and 2 and two phosphorothioate internucleotide linkage modifications within positions 18-23 of the antisense strand (counting from the 5′-end of the antisense strand).

[0433] The RNAi agent can comprise a phosphorus-containing group at the 5′-end of the sense strand or antisense strand. The 5′-end phosphorus-containing group can be 5′-end phosphate (5′-P), 5′-end phosphorothioate (5′-PS), 5′-end phosphorodithioate (5′-PS₂), 5′-end vinylphosphonate (5′-VP), 5′-end methylphosphonate (MePhos), or 5′-deoxy-5′-C-malonyl

[chemical structure]

When the 5′-end phosphorus-containing group is 5′-end vinylphosphonate (5′-VP), the 5′-VP can be either 5′-E-VP isomer (i.e., trans-vinylphosphate,

[chemical structure]

5′-Z-VP isomer (i.e., cis-vinylphosphate,

[chemical structure]

or mixtures thereof.
In one embodiment, the RNAi agent comprises a phosphorus-containing group at the 5′-end of the sense strand. In one embodiment, the RNAi agent comprises a phosphorus-containing group at the 5′-end of the antisense strand.

[0434] In one embodiment, the RNAi agent comprises a 5′-P. In one embodiment, the RNAi agent comprises a 5′-P in the antisense strand.

[0435] In one embodiment, the RNAi agent comprises a 5′-PS. In one embodiment, the RNAi agent comprises a 5′-PS in the antisense strand.

[0436] In one embodiment, the RNAi agent comprises a 5′-VP. In one embodiment, the RNAi agent comprises a 5′-VP in the antisense strand. In one embodiment, the RNAi agent comprises a 5′-E-VP in the antisense strand. In one embodiment, the RNAi agent comprises a 5′-Z-VP in the antisense strand.

[0437] In one embodiment, the RNAi agent comprises a 5′-PS₂. In one embodiment, the RNAi agent comprises a 5′-PS₂ in the antisense strand.

[0438] In one embodiment, the RNAi agent comprises a 5′-PS₂. In one embodiment, the RNAi agent comprises a 5′-deoxy-5′-C-malonyl in the antisense strand.

In one embodiment, B1 is 2′-OMe or 2′-F, n¹ is 8, T1 is 2′F, n² is 3, B2 is 2′-OMe, n³ is 7, n⁴ is 0, B3 is 2′OMe, n⁵ is 3, B1′ is 2′-OMe or 2′-F, q¹ is 9, T1′ is 2′-F, q² is 1, B2′ is 2′-OMe or 2′-F, q³ is 4, T2′ is 2′-F, q⁴ is 2, B3′ is 2′-OMe or 2′-F, q is 5, T3′ is 2′-F, q⁶ is 1, B4′ is 2′-OMe, and q⁷ is 1. The RNAi agent also comprises a 5′-PS.

[0439] In one embodiment, B1 is 2′-OMe or 2′-F, n¹ is 8, T1 is 2′F, n² is 3, B2 is 2′-OMe, n³ is 7, n⁴ is 0, B3 is 2′OMe, n⁵ is 3, B1′ is 2′-OMe or 2′-F, q¹ is 9, T1′ is 2′-F, q² is 1, B2′ is 2′-OMe or 2′-F, q³ is 4, T2′ is 2′-F, q⁴ is 2, B3′ is 2′-OMe or 2′-F, q is 5, T3′ is 2′-F, q⁶ is 1, B4′ is 2′- OMe, and q⁷ is 1. The RNAi agent also comprises a 5′-P.

[0440] In one embodiment, B1 is 2′-OMe or 2′-F, n¹ is 8, T1 is 2′F, n² is 3, B2 is 2′-OMe, n³ is 7, n⁴ is 0, B3 is 2′OMe, n⁵ is 3, B1′ is 2′-OMe or 2′-F, q¹ is 9, T1′ is 2′-F, q² is 1, B2′ is 2′-OMe or 2′-F, q³ is 4, T2′ is 2′-F, q⁴ is 2, B3′ is 2′-OMe or 2′-F, q is 5, T3′ is 2′-F, q⁶ is 1, B4′ is 2′- OMe, and q⁷ is 1. The RNAi agent also comprises a 5′-VP. The 5′-VP may be 5′-E-VP, 5′-Z-VP, or combination thereof.

[0441] In one embodiment, B1 is 2′-OMe or 2′-F, n¹ is 8, T1 is 2′F, n² is 3, B2 is 2′-OMe, n³ is 7, n⁴ is 0, B3 is 2′OMe, n⁵ is 3, B1′ is 2′-OMe or 2′-F, q¹ is 9, T1′ is 2′-F, q² is 1, B2′ is 2′-OMe or 2′-F, q³ is 4, T2′ is 2′-F, q⁴ is 2, B3′ is 2′-OMe or 2′-F, q is 5, T3′ is 2′-F, q⁶ is 1, B4′ is 2′- OMe, and q⁷ is 1. The RNAi agent also comprises a 5′-PS₂.

[0442] In one embodiment, B1 is 2′-OMe or 2′-F, n¹ is 8, T1 is 2′F, n² is 3, B2 is 2′-OMe, n³ is 7, n⁴ is 0, B3 is 2′OMe, n⁵ is 3, B1′ is 2′-OMe or 2′-F, q¹ is 9, T1′ is 2′-F, q² is 1, B2′ is 2′-OMe or 2′-F, q³ is 4, T2′ is 2′-F, q⁴ is 2, B3′ is 2′-OMe or 2′-F, q is 5, T3′ is 2′-F, q⁶ is 1, B4′ is 2′- OMe, and q⁷ is 1. The RNAi agent also comprises a 5′-deoxy-5′-C-malonyl.

[0443] In one embodiment, B1 is 2′-OMe or 2′-F, n¹ is 8, T1 is 2′F, n² is 3, B2 is 2′-OMe, n³ is 7, n⁴ is 0, B3 is 2′-OMe, n⁵ is 3, B1′ is 2′-OMe or 2′-F, q¹ is 9, T1′ is 2′-F, q² is 1, B2′ is 2′-OMe or 2′-F, q³ is 4, T2′ is 2′-F, q⁴ is 2, B3′ is 2′-OMe or 2′-F, q is 5, T3′ is 2′-F, q⁶ is 1, B4′ is 2′- OMe, and q⁷ is 1; with two phosphorothioate internucleotide linkage modifications within position 1-5 of the sense strand (counting from the 5′-end of the sense strand), and two phosphorothioate internucleotide linkage modifications at positions 1 and 2 and two phosphorothioate internucleotide linkage modifications within positions 18-23 of the antisense strand (counting from the 5′-end of the antisense strand). The RNAi agent also comprises a 5′-P.

[0444] In one embodiment, B1 is 2′-OMe or 2′-F, n¹ is 8, T1 is 2′F, n² is 3, B2 is 2′-OMe, n³ is 7, n⁴ is 0, B3 is 2′-OMe, n⁵ is 3, B1′ is 2′-OMe or 2′-F, q¹ is 9, T1′ is 2′-F, q² is 1, B2′ is 2′-OMe or 2′-F, q³ is 4, T2′ is 2′-F, q⁴ is 2, B3′ is 2′-OMe or 2′-F, q⁵ is 5, T3′ is 2′-F, q⁶ is 1, B4′ is 2′-OMe, and q⁷ is 1; with two phosphorothioate internucleotide linkage modifications within position 1-5 of the sense strand (counting from the 5′-end of the sense strand), and two phosphorothioate internucleotide linkage modifications at positions 1 and 2 and two phosphorothioate internucleotide linkage modifications within positions 18-23 of the antisense strand (counting from the 5′-end of the antisense strand). The RNAi agent also comprises a 5′-PS.

[0445] In one embodiment, B1 is 2′-OMe or 2′-F, n¹ is 8, T1 is 2′F, n² is 3, B2 is 2′-OMe, n³ is 7, n⁴ is 0, B3 is 2′-OMe, n⁵ is 3, B1′ is 2′-OMe or 2′-F, q¹ is 9, T1′ is 2′-F, q² is 1, B2′ is 2′-OMe or 2′-F, q³ is 4, T2′ is 2′-F, q⁴ is 2, B3′ is 2′-OMe or 2′-F, q⁵ is 5, T3′ is 2′-F, q⁶ is 1, B4′ is 2′-OMe, and q⁷ is 1; with two phosphorothioate internucleotide linkage modifications within position 1-5 of the sense strand (counting from the 5′-end of the sense strand), and two phosphorothioate internucleotide linkage modifications at positions 1 and 2 and two phosphorothioate internucleotide linkage modifications within positions 18-23 of the antisense strand (counting from the 5′-end of the antisense strand). The RNAi agent also comprises a 5′-VP. The 5′-VP may be 5′-E-VP, 5′-Z-VP, or combination thereof.

In one embodiment, B1 is 2′-OMe or 2′-F, n¹ is 8, T1 is 2′F, n² is 3, B2 is 2′-OMe, n³ is 7, n⁴ is 0, B3 is 2′-OMe, n⁵ is 3, B1′ is 2′-OMe or 2′-F, q¹ is 9, T1′ is 2′-F, q² is 1, B2′ is 2′-OMe or 2′-F, q³ is 4, T2′ is 2′-F, q⁴ is 2, B3′ is 2′-OMe or 2′-F, q⁵ is 5, T3′ is 2′-F, q⁶ is 1, B4′ is 2′-OMe, and q⁷ is 1; with two phosphorothioate internucleotide linkage modifications within position 1-5 of the sense strand (counting from the 5′-end of the sense strand), and two phosphorothioate internucleotide linkage modifications at positions 1 and 2 and two phosphorothioate internucleotide linkage modifications within positions 18-23 of the antisense strand (counting from the 5′-end of the antisense strand). The RNAi agent also comprises a 5′-PS₂.

[0446] In one embodiment, B1 is 2′-OMe or 2′-F, n¹ is 8, T1 is 2′F, n² is 3, B2 is 2′-OMe, n³ is 7, n⁴ is 0, B3 is 2′-OMe, n⁵ is 3, B1′ is 2′-OMe or 2′-F, q¹ is 9, T1′ is 2′-F, q² is 1, B2′ is 2′-OMe or 2′-F, q³ is 4, T2′ is 2′-F, q⁴ is 2, B3′ is 2′-OMe or 2′-F, q⁵ is 5, T3′ is 2′-F, q⁶ is 1, B4′ is 2′-OMe, and q⁷ is 1; with two phosphorothioate internucleotide linkage modifications within position 1-5 of the sense strand (counting from the 5′-end of the sense strand), and two phosphorothioate internucleotide linkage modifications at positions 1 and 2 and two phosphorothioate internucleotide linkage modifications within positions 18-23 of the antisense strand (counting from the 5′-end of the antisense strand). The RNAi agent also comprises a 5′-deoxy-5′-C-malonyl.

[0447] In one embodiment, B1 is 2′-OMe or 2′-F, n¹ is 8, T1 is 2′F, n² is 3, B2 is 2′-OMe, n³ is 7, n⁴ is 0, B3 is 2′-OMe, n⁵ is 3, B1′ is 2′-OMe or 2′-F, q¹ is 9, T1′ is 2′-F, q² is 1, B2′ is 2′-OMe or 2′-F, q³ is 4, q⁴ is 0, B3′ is 2′-OMe or 2′-F, q⁵ is 7, T3′ is 2′-F, q⁶ is 1, B4′ is 2′-OMe, and q⁷ is 1. The RNAi agent also comprises a 5′-P.

[0448] In one embodiment, B1 is 2′-OMe or 2′-F, n¹ is 8, T1 is 2′F, n² is 3, B2 is 2′-OMe, n³ is 7, n⁴ is 0, B3 is 2′-OMe, n⁵ is 3, B1′ is 2′-OMe or 2′-F, q¹ is 9, T1′ is 2′-F, q² is 1, B2′ is 2′-OMe or 2′-F, q³ is 4, q⁴ is 0, B3′ is 2′-OMe or 2′-F, q⁵ is 7, T3′ is 2′-F, q⁶ is 1, B4′ is 2′-OMe, and q⁷ is 1. The dsRNA agent also comprises a 5′-PS.

[0449] In one embodiment, B1 is 2′-OMe or 2′-F, n¹ is 8, T1 is 2′F, n² is 3, B2 is 2′-OMe, n³ is 7, n⁴ is 0, B3 is 2′-OMe, n⁵ is 3, B1′ is 2′-OMe or 2′-F, q¹ is 9, T1′ is 2′-F, q² is 1, B2′ is 2′-OMe or 2′-F, q³ is 4, q⁴ is 0, B3′ is 2′-OMe or 2′-F, q⁵ is 7, T3′ is 2′-F, q⁶ is 1, B4′ is 2′-OMe, and q⁷ is 1. The RNAi agent also comprises a 5′-VP. The 5′-VP may be 5′-E-VP, 5′-Z-VP, or combination thereof. In one embodiment, B1 is 2′-OMe or 2′-F, n¹ is 8, T1 is 2′F, n² is 3, B2 is 2′-OMe, n³ is 7, n⁴ is 0, B3 is 2′-OMe, n⁵ is 3, B1′ is 2′-OMe or 2′-F, q¹ is 9, T1′ is 2′-F, q² is 1, B2′ is 2′-OMe or 2′-F, q³ is 4, q⁴ is 0, B3′ is 2′-OMe or 2′-F, q⁵ is 7, T3′ is 2′-F, q⁶ is 1, B4′ is 2′-OMe, and q⁷ is 1. The RNAi agent also comprises a 5′-PS₂.

[0450] In one embodiment, B1 is 2′-OMe or 2′-F, n¹ is 8, T1 is 2′F, n² is 3, B2 is 2′-OMe, n³ is 7, n⁴ is 0, B3 is 2′-OMe, n⁵ is 3, B1′ is 2′-OMe or 2′-F, q¹ is 9, T1′ is 2′-F, q² is 1, B2′ is 2′-OMe or 2′-F, q³ is 4, q⁴ is 0, B3′ is 2′-OMe or 2′-F, q⁵ is 7, T3′ is 2′-F, q⁶ is 1, B4′ is 2′-OMe, and q⁷ is 1. The RNAi agent also comprises a 5′-deoxy-5′-C-malonyl.

[0451] In one embodiment, B1 is 2′-OMe or 2′-F, n¹ is 8, T1 is 2′F, n² is 3, B2 is 2′-OMe, n³ is 7, n⁴ is 0, B3 is 2′-OMe, n⁵ is 3, B1′ is 2′-OMe or 2′-F, q¹ is 9, T1′ is 2′-F, q² is 1, B2′ is 2′-OMe or 2′-F, q³ is 4, q⁴ is 0, B3′ is 2′-OMe or 2′-F, q⁵ is 7, T3′ is 2′-F, q⁶ is 1, B4′ is 2′-OMe, and q⁷ is 1; with two phosphorothioate internucleotide linkage modifications within position 1-5 of the sense strand (counting from the 5′-end), and two phosphorothioate internucleotide linkage modifications at positions 1 and 2 and two phosphorothioate internucleotide linkage modifications within positions 18-23 of the antisense strand (counting from the 5′-end). The RNAi agent also comprises a 5′-P.

[0452] In one embodiment, B1 is 2′-OMe or 2′-F, n¹ is 8, T1 is 2′F, n² is 3, B2 is 2′-OMe, n³ is 7, n⁴ is 0, B3 is 2′-OMe, n⁵ is 3, B1′ is 2′-OMe or 2′-F, q¹ is 9, T1′ is 2′-F, q² is 1, B2′ is 2′-OMe or 2′-F, q³ is 4, q⁴ is 0, B3′ is 2′-OMe or 2′-F, q⁵ is 7, T3′ is 2′-F, q⁶ is 1, B4′ is 2′-OMe, and q⁷ is 1; with two phosphorothioate internucleotide linkage modifications within position 1-5 of the sense strand (counting from the 5′-end), and two phosphorothioate internucleotide linkage modifications at positions 1 and 2 and two phosphorothioate internucleotide linkage modifications within positions 18-23 of the antisense strand (counting from the 5′-end). The RNAi agent also comprises a 5′-PS.

[0453] In one embodiment, B1 is 2′-OMe or 2′-F, n¹ is 8, T1 is 2′F, n² is 3, B2 is 2′-OMe, n³ is 7, n⁴ is 0, B3 is 2′-OMe, n⁵ is 3, B1′ is 2′-OMe or 2′-F, q¹ is 9, T1′ is 2′-F, q² is 1, B2′ is 2′-OMe or 2′-F, q³ is 4, q⁴ is 0, B3′ is 2′-OMe or 2′-F, q⁵ is 7, T3′ is 2′-F, q⁶ is 1, B4′ is 2′-OMe, and q⁷ is 1; with two phosphorothioate internucleotide linkage modifications within position 1-5 of the sense strand (counting from the 5′-end), and two phosphorothioate internucleotide linkage modifications at positions 1 and 2 and two phosphorothioate internucleotide linkage modifications within positions 18-23 of the antisense strand (counting from the 5′-end). The RNAi agent also comprises a 5′-VP. The 5′-VP may be 5′-E-VP, 5′-Z-VP, or combination thereof.

[0454] In one embodiment, B1 is 2′-OMe or 2′-F, n¹ is 8, T1 is 2′F, n² is 3, B2 is 2′-OMe, n³ is 7, n⁴ is 0, B3 is 2′-OMe, n⁵ is 3, B1′ is 2′-OMe or 2′-F, q¹ is 9, T1′ is 2′-F, q² is 1, B2′ is 2′-OMe or 2′-F, q³ is 4, q⁴ is 0, B3′ is 2′-OMe or 2′-F, q⁵ is 7, T3′ is 2′-F, q⁶ is 1, B4′ is 2′-OMe, and q⁷ is 1; with two phosphorothioate internucleotide linkage modifications within position 1-5 of the sense strand (counting from the 5′-end), and two phosphorothioate internucleotide linkage modifications at positions 1 and 2 and two phosphorothioate internucleotide linkage modifications within positions 18-23 of the antisense strand (counting from the 5′-end). The RNAi agent also comprises a 5′-PS₂.

[0455] In one embodiment, B1 is 2′-OMe or 2′-F, n¹ is 8, T1 is 2′F, n² is 3, B2 is 2′-OMe, n³ is 7, n⁴ is 0, B3 is 2′-OMe, n⁵ is 3, B1′ is 2′-OMe or 2′-F, q¹ is 9, T1′ is 2′-F, q² is 1, B2′ is 2′-OMe or 2′-F, q³ is 4, q⁴ is 0, B3′ is 2′-OMe or 2′-F, q⁵ is 7, T3′ is 2′-F, q⁶ is 1, B4′ is 2′-OMe, and q⁷ is 1; with two phosphorothioate internucleotide linkage modifications within position 1-5 of the sense strand (counting from the 5′-end), and two phosphorothioate internucleotide linkage modifications at positions 1 and 2 and two phosphorothioate internucleotide linkage modifications within positions 18-23 of the antisense strand (counting from the 5′-end). The RNAi agent also comprises a 5′-deoxy-5′-C-malonyl.

In one embodiment, B1 is 2′-OMe or 2′-F, n¹ is 8, T1 is 2′F, n² is 3, B2 is 2′-OMe, n³ is 7, n⁴ is 0, B3 is 2′OMe, n⁵ is 3, B1′ is 2′-OMe or 2′-F, q¹ is 9, T1′ is 2′-F, q² is 1, B2′ is 2′-OMe or 2′-F, q³ is 4, T2′ is 2′-F, q⁴ is 2, B3′ is 2′-OMe or 2′-F, q⁵ is 5, T3′ is 2′-F, q⁶ is 1, B4′ is 2′-F, and q⁷ is 1. The RNAi agent also comprises a 5′-P.

[0456] In one embodiment, B1 is 2′-OMe or 2′-F, n¹ is 8, T1 is 2′F, n² is 3, B2 is 2′-OMe, n³ is 7, n⁴ is 0, B3 is 2′OMe, n⁵ is 3, B1′ is 2′-OMe or 2′-F, q¹ is 9, T1′ is 2′-F, q² is 1, B2′ is 2′-OMe or 2′-F, q³ is 4, T2′ is 2′-F, q⁴ is 2, B3′ is 2′-OMe or 2′-F, q⁵ is 5, T3′ is 2′-F, q⁶ is 1, B4′ is 2′-F, and q⁷ is 1. The RNAi agent also comprises a 5′-PS.

[0457] In one embodiment, B1 is 2′-OMe or 2′-F, n¹ is 8, T1 is 2′F, n² is 3, B2 is 2′-OMe, n³ is 7, n⁴ is 0, B3 is 2′OMe, n⁵ is 3, B1′ is 2′-OMe or 2′-F, q¹ is 9, T1′ is 2′-F, q² is 1, B2′ is 2′-OMe or 2′-F, q³ is 4, T2′ is 2′-F, q⁴ is 2, B3′ is 2′-OMe or 2′-F, q⁵ is 5, T3′ is 2′-F, q⁶ is 1, B4′ is 2′-F, and q⁷ is 1. The RNAi agent also comprises a 5′-V P. The 5′-VP may be 5′-E-VP, 5′-Z-VP, or combination thereof.

In one embodiment, B1 is 2′-OMe or 2′-F, n¹ is 8, T1 is 2′F, n² is 3, B2 is 2′-OMe, n³ is 7, n⁴ is 0, B3 is 2′OMe, n⁵ is 3, B1′ is 2′-OMe or 2′-F, q¹ is 9, T1′ is 2′-F, q² is 1, B2′ is 2′-OMe or 2′-F, q³ is 4, T2′ is 2′-F, q⁴ is 2, B3′ is 2′-OMe or 2′-F, q⁵ is 5, T3′ is 2′-F, q⁶ is 1, B4′ is 2′-F, and q⁷ is 1. The dsRNAi RNA agent also comprises a 5′-PS₂.

[0458] In one embodiment, B1 is 2′-OMe or 2′-F, n¹ is 8, T1 is 2′F, n² is 3, B2 is 2′-OMe, n³ is 7, n⁴ is 0, B3 is 2′OMe, n⁵ is 3, B1′ is 2′-OMe or 2′-F, q¹ is 9, T1′ is 2′-F, q² is 1, B2′ is 2′-OMe or 2′-F, q³ is 4, T2′ is 2′-F, q⁴ is 2, B3′ is 2′-OMe or 2′-F, q⁵ is 5, T3′ is 2′-F, q⁶ is 1, B4′ is 2′-F, and q⁷ is 1. The RNAi agent also comprises a 5′-deoxy-5′-C-malonyl.

[0459] In one embodiment, B1 is 2′-OMe or 2′-F, n¹ is 8, T1 is 2′F, n² is 3, B2 is 2′-OMe, n³ is 7, n⁴ is 0, B3 is 2′-OMe, n⁵ is 3, B1′ is 2′-OMe or 2′-F, q¹ is 9, T1′ is 2′-F, q² is 1, B2′ is 2′-OMe or 2′-F, q³ is 4, T2′ is 2′-F, q⁴ is 2, B3′ is 2′-OMe or 2′-F, q⁵ is 5, T3′ is 2′-F, q⁶ is 1, B4′ is 2′-F, and q⁷ is 1; with two phosphorothioate internucleotide linkage modifications within position 1-5 of the sense strand (counting from the 5′-end of the sense strand), and two phosphorothioate internucleotide linkage modifications at positions 1 and 2 and two phosphorothioate internucleotide linkage modifications within positions 18-23 of the antisense strand (counting from the 5′-end of the antisense strand). The RNAi agent also comprises a 5′-P.

[0460] In one embodiment, B1 is 2′-OMe or 2′-F, n¹ is 8, T1 is 2′F, n² is 3, B2 is 2′-OMe, n³ is 7, n⁴ is 0, B3 is 2′-OMe, n⁵ is 3, B1′ is 2′-OMe or 2′-F, q¹ is 9, T1′ is 2′-F, q² is 1, B2′ is 2′-OMe or 2′-F, q³ is 4, T2′ is 2′-F, q⁴ is 2, B3′ is 2′-OMe or 2′-F, q⁵ is 5, T3′ is 2′-F, q⁶ is 1, B4′ is 2′-F, and q⁷ is 1; with two phosphorothioate internucleotide linkage modifications within position 1-5 of the sense strand (counting from the 5′-end of the sense strand), and two phosphorothioate internucleotide linkage modifications at positions 1 and 2 and two phosphorothioate internucleotide linkage modifications within positions 18-23 of the antisense strand (counting from the 5′-end of the antisense strand). The RNAi agent also comprises a 5′-PS.

[0461] In one embodiment, B1 is 2′-OMe or 2′-F, n¹ is 8, T1 is 2′F, n² is 3, B2 is 2′-OMe, n³ is 7, n⁴ is 0, B3 is 2′-OMe, n⁵ is 3, B1′ is 2′-OMe or 2′-F, q¹ is 9, T1′ is 2′-F, q² is 1, B2′ is 2′-OMe or 2′-F, q³ is 4, T2′ is 2′-F, q⁴ is 2, B3′ is 2′-OMe or 2′-F, q⁵ is 5, T3′ is 2′-F, q⁶ is 1, B4′ is 2′-F, and q⁷ is 1; with two phosphorothioate internucleotide linkage modifications within position 1-5 of the sense strand (counting from the 5′-end of the sense strand), and two phosphorothioate internucleotide linkage modifications at positions 1 and 2 and two phosphorothioate internucleotide linkage modifications within positions 18-23 of the antisense strand (counting from the 5′-end of the antisense strand). The RNAi agent also comprises a 5′-V P. The 5′-VP may be 5′-E-VP, 5′-Z-VP, or combination thereof.

[0462] In one embodiment, B1 is 2′-OMe or 2′-F, n¹ is 8, T1 is 2′F, n² is 3, B2 is 2′-OMe, n³ is 7, n⁴ is 0, B3 is 2′-OMe, n⁵ is 3, B1′ is 2′-OMe or 2′-F, q¹ is 9, T1′ is 2′-F, q² is 1, B2′ is 2′-OMe or 2′-F, q³ is 4, T2′ is 2′-F, q⁴ is 2, B3′ is 2′-OMe or 2′-F, q⁵ is 5, T3′ is 2′-F, q⁶ is 1, B4′ is 2′-F, and q⁷ is 1; with two phosphorothioate internucleotide linkage modifications within position 1-5 of the sense strand (counting from the 5′-end of the sense strand), and two phosphorothioate internucleotide linkage modifications at positions 1 and 2 and two phosphorothioate internucleotide linkage modifications within positions 18-23 of the antisense strand (counting from the 5′-end of the antisense strand). The RNAi agent also comprises a 5′-PS₂.

[0463] In one embodiment, B1 is 2′-OMe or 2′-F, n¹ is 8, T1 is 2′F, n² is 3, B2 is 2′-OMe, n³ is 7, n⁴ is 0, B3 is 2′-OMe, n⁵ is 3, B1′ is 2′-OMe or 2′-F, q¹ is 9, T1′ is 2′-F, q² is 1, B2′ is 2′-OMe or 2′-F, q³ is 4, T2′ is 2′-F, q⁴ is 2, B3′ is 2′-OMe or 2′-F, q⁵ is 5, T3′ is 2′-F, q⁶ is 1, B4′ is 2′-F, and q⁷ is 1; with two phosphorothioate internucleotide linkage modifications within position 1-5 of the sense strand (counting from the 5′-end of the sense strand), and two phosphorothioate internucleotide linkage modifications at positions 1 and 2 and two phosphorothioate internucleotide linkage modifications within positions 18-23 of the antisense strand (counting from the 5′-end of the antisense strand). The RNAi agent also comprises a 5′-deoxy-5′-C-malonyl.

[0464] In one embodiment, B1 is 2′-OMe or 2′-F, n¹ is 8, T1 is 2′F, n² is 3, B2 is 2′-OMe, n³ is 7, n⁴ is 0, B3 is 2′-OMe, n⁵ is 3, B1′ is 2′-OMe or 2′-F, q¹ is 9, T1′ is 2′-F, q² is 1, B2′ is 2′-OMe or 2′-F, q³ is 4, q⁴ is 0, B3′ is 2′-OMe or 2′-F, q⁵ is 7, T3′ is 2′-F, q⁶ is 1, B4′ is 2′-F, and q⁷ is 1. The RNAi agent also comprises a 5′-P.

[0465] In one embodiment, B1 is 2′-OMe or 2′-F, n¹ is 8, T1 is 2′F, n² is 3, B2 is 2′-OMe, n³ is 7, n⁴ is 0, B3 is 2′-OMe, n⁵ is 3, B1′ is 2′-OMe or 2′-F, q¹ is 9, T1′ is 2′-F, q² is 1, B2′ is 2′-OMe or 2′-F, q³ is 4, q⁴ is 0, B3′ is 2′-OMe or 2′-F, q⁵ is 7, T3′ is 2′-F, q⁶ is 1, B4′ is 2′-F, and q⁷ is 1. The RNAi agent also comprises a 5′-PS.

[0466] In one embodiment, B1 is 2′-OMe or 2′-F, n¹ is 8, T1 is 2′F, n² is 3, B2 is 2′-OMe, n³ is 7, n⁴ is 0, B3 is 2′-OMe, n⁵ is 3, B1′ is 2′-OMe or 2′-F, q¹ is 9, T1′ is 2′-F, q² is 1, B2′ is 2′-OMe or 2′-F, q³ is 4, q⁴ is 0, B3′ is 2′-OMe or 2′-F, q⁵ is 7, T3′ is 2′-F, q⁶ is 1, B4′ is 2′-F, and q⁷ is 1. The RNAi agent also comprises a 5′-V P. The 5′-VP may be 5′-E-VP, 5′-Z-VP, or combination thereof.

[0467] In one embodiment, B1 is 2′-OMe or 2′-F, n¹ is 8, T1 is 2′F, n² is 3, B2 is 2′-OMe, n³ is 7, n⁴ is 0, B3 is 2′-OMe, n⁵ is 3, B1′ is 2′-OMe or 2′-F, q¹ is 9, T1′ is 2′-F, q² is 1, B2′ is 2′-OMe or 2′-F, q³ is 4, q⁴ is 0, B3′ is 2′-OMe or 2′-F, q⁵ is 7, T3′ is 2′-F, q⁶ is 1, B4′ is 2′-F, and q⁷ is 1. The RNAi agent also comprises a 5′-PS₂.

[0468] In one embodiment, B1 is 2′-OMe or 2′-F, n¹ is 8, T1 is 2′F, n² is 3, B2 is 2′-OMe, n³ is 7, n⁴ is 0, B3 is 2′-OMe, n⁵ is 3, B1′ is 2′-OMe or 2′-F, q¹ is 9, T1′ is 2′-F, q² is 1, B2′ is 2′-OMe or 2′-F, q³ is 4, q⁴ is 0, B3′ is 2′-OMe or 2′-F, q⁵ is 7, T3′ is 2′-F, q⁶ is 1, B4′ is 2′-F, and q⁷ is 1. The RNAi agent also comprises a 5′-deoxy-5′-C-malonyl.

[0469] In one embodiment, B1 is 2′-OMe or 2′-F, n¹ is 8, T1 is 2′F, n² is 3, B2 is 2′-OMe, n³ is 7, n⁴ is 0, B3 is 2′-OMe, n⁵ is 3, B1′ is 2′-OMe or 2′-F, q¹ is 9, T1′ is 2′-F, q² is 1, B2′ is 2′-OMe or 2′-F, q³ is 4, q⁴ is 0, B3′ is 2′-OMe or 2′-F, q⁵ is 7, T3′ is 2′-F, q⁶ is 1, B4′ is 2′-F, and q⁷ is 1; with two phosphorothioate internucleotide linkage modifications within position 1-5 of the sense strand (counting from the 5′-end of the sense strand), and two phosphorothioate internucleotide linkage modifications at positions 1 and 2 and two phosphorothioate internucleotide linkage modifications within positions 18-23 of the antisense strand (counting from the 5′-end of the antisense strand). The RNAi agent also comprises a 5′-P.

[0470] In one embodiment, B1 is 2′-OMe or 2′-F, n¹ is 8, T1 is 2′F, n² is 3, B2 is 2′-OMe, n³ is 7, n⁴ is 0, B3 is 2′-OMe, n⁵ is 3, B1′ is 2′-OMe or 2′-F, q¹ is 9, T1′ is 2′-F, q² is 1, B2′ is 2′-OMe or 2′-F, q³ is 4, q⁴ is 0, B3′ is 2′-OMe or 2′-F, q⁵ is 7, T3′ is 2′-F, q⁶ is 1, B4′ is 2′-F, and q⁷ is 1; with two phosphorothioate internucleotide linkage modifications within position 1-5 of the sense strand (counting from the 5′-end of the sense strand), and two phosphorothioate internucleotide linkage modifications at positions 1 and 2 and two phosphorothioate internucleotide linkage modifications within positions 18-23 of the antisense strand (counting from the 5′-end of the antisense strand). The RNAi agent also comprises a 5′-PS.

[0471] In one embodiment, B1 is 2′-OMe or 2′-F, n¹ is 8, T1 is 2′F, n² is 3, B2 is 2′-OMe, n³ is 7, n⁴ is 0, B3 is 2′-OMe, n⁵ is 3, B1′ is 2′-OMe or 2′-F, q¹ is 9, T1′ is 2′-F, q² is 1, B2′ is 2′-OMe or 2′-F, q³ is 4, q⁴ is 0, B3′ is 2′-OMe or 2′-F, q⁵ is 7, T3′ is 2′-F, q⁶ is 1, B4′ is 2′-F, and q⁷ is 1; with two phosphorothioate internucleotide linkage modifications within position 1-5 of the sense strand (counting from the 5′-end of the sense strand), and two phosphorothioate internucleotide linkage modifications at positions 1 and 2 and two phosphorothioate internucleotide linkage modifications within positions 18-23 of the antisense strand (counting from the 5′-end of the antisense strand). The RNAi agent also comprises a 5′-V P. The 5′-VP may be 5′-E-VP, 5′-Z-VP, or combination thereof.

[0472] In one embodiment, B1 is 2′-OMe or 2′-F, n¹ is 8, T1 is 2′F, n² is 3, B2 is 2′-OMe, n³ is 7, n⁴ is 0, B3 is 2′-OMe, n⁵ is 3, B1′ is 2′-OMe or 2′-F, q¹ is 9, T1′ is 2′-F, q² is 1, B2′ is 2′-OMe or 2′-F, q³ is 4, q⁴ is 0, B3′ is 2′-OMe or 2′-F, q⁵ is 7, T3′ is 2′-F, q⁶ is 1, B4′ is 2′-F, and q⁷ is 1; with two phosphorothioate internucleotide linkage modifications within position 1-5 of the sense strand (counting from the 5′-end of the sense strand), and two phosphorothioate internucleotide linkage modifications at positions 1 and 2 and two phosphorothioate internucleotide linkage modifications within positions 18-23 of the antisense strand (counting from the 5′-end of the antisense strand). The RNAi agent also comprises a 5′-PS₂.

[0473] In one embodiment, B1 is 2′-OMe or 2′-F, n¹ is 8, T1 is 2′F, n² is 3, B2 is 2′-OMe, n³ is 7, n⁴ is 0, B3 is 2′-OMe, n⁵ is 3, B1′ is 2′-OMe or 2′-F, q¹ is 9, T1′ is 2′-F, q² is 1, B2′ is 2′-OMe or 2′-F, q³ is 4, q⁴ is 0, B3′ is 2′-OMe or 2′-F, q⁵ is 7, T3′ is 2′-F, q⁶ is 1, B4′ is 2′-F, and q⁷ is 1; with two phosphorothioate internucleotide linkage modifications within position 1-5 of the sense strand (counting from the 5′-end of the sense strand), and two phosphorothioate internucleotide linkage modifications at positions 1 and 2 and two phosphorothioate internucleotide linkage modifications within positions 18-23 of the antisense strand (counting from the 5′-end of the antisense strand). The RNAi agent also comprises a 5′-deoxy-5′-C-malonyl.

[0474] In one embodiment, B1 is 2′-OMe or 2′-F, n¹ is 8, T1 is 2′F, n² is 3, B2 is 2′-OMe, n³ is 7, n⁴ is 0, B3 is 2′-OMe, n⁵ is 3, B1′ is 2′-OMe or 2′-F, q¹ is 9, T1′ is 2′-F, q² is 1, B2′ is 2′-OMe or 2′-F, q³ is 4, T2′ is 2′-F, q⁴ is 2, B3′ is 2′-OMe or 2′-F, q⁵ is 5, T3′ is 2′-F, q⁶ is 1, B4′ is 2′-OMe, and q⁷ is 1; with two phosphorothioate internucleotide linkage modifications within position 1-5 of the sense strand (counting from the 5′-end of the sense strand), and two phosphorothioate internucleotide linkage modifications at positions 1 and 2 and two phosphorothioate internucleotide linkage modifications within positions 18-23 of the antisense strand (counting from the 5′-end of the antisense strand). The RNAi agent also comprises a 5′-P and a targeting ligand. In one embodiment, the 5′-P is at the 5′-end of the antisense strand, and the targeting ligand is at the 3′-end of the sense strand.

[0475] In one embodiment, B1 is 2′-OMe or 2′-F, n¹ is 8, T1 is 2′F, n² is 3, B2 is 2′-OMe, n³ is 7, n⁴ is 0, B3 is 2′-OMe, n⁵ is 3, B1′ is 2′-OMe or 2′-F, q¹ is 9, T1′ is 2′-F, q² is 1, B2′ is 2′-OMe or 2′-F, q³ is 4, T2′ is 2′-F, q⁴ is 2, B3′ is 2′-OMe or 2′-F, q⁵ is 5, T3′ is 2′-F, q⁶ is 1, B4′ is 2′-OMe, and q⁷ is 1; with two phosphorothioate internucleotide linkage modifications within position 1-5 of the sense strand (counting from the 5′-end of the sense strand), and two phosphorothioate internucleotide linkage modifications at positions 1 and 2 and two phosphorothioate internucleotide linkage modifications within positions 18-23 of the antisense strand (counting from the 5′-end of the antisense strand). The RNAi agent also comprises a 5′-PS and a targeting ligand. In one embodiment, the 5′-PS is at the 5′-end of the antisense strand, and the targeting ligand is at the 3′-end of the sense strand.

[0476] In one embodiment, B1 is 2′-OMe or 2′-F, n¹ is 8, T1 is 2′F, n² is 3, B2 is 2′-OMe, n³ is 7, n⁴ is 0, B3 is 2′-OMe, n⁵ is 3, B1′ is 2′-OMe or 2′-F, q¹ is 9, T1′ is 2′-F, q² is 1, B2′ is 2′-OMe or 2′-F, q³ is 4, T2′ is 2′-F, q⁴ is 2, B3′ is 2′-OMe or 2′-F, q⁵ is 5, T3′ is 2′-F, q⁶ is 1, B4′ is 2′-OMe, and q⁷ is 1; with two phosphorothioate internucleotide linkage modifications within position 1-5 of the sense strand (counting from the 5′-end of the sense strand), and two phosphorothioate internucleotide linkage modifications at positions 1 and 2 and two phosphorothioate internucleotide linkage modifications within positions 18-23 of the antisense strand (counting from the 5′-end of the antisense strand). The RNAi agent also comprises a 5′-VP (e.g., a 5′-E-VP, 5′-Z-VP, or combination thereof), and a targeting ligand.

[0477] In one embodiment, the 5′-VP is at the 5′-end of the antisense strand, and the targeting ligand is at the 3′-end of the sense strand.

[0478] In one embodiment, B1 is 2′-OMe or 2′-F, n¹ is 8, T1 is 2′F, n² is 3, B2 is 2′-OMe, n³ is 7, n⁴ is 0, B3 is 2′-OMe, n⁵ is 3, B1′ is 2′-OMe or 2′-F, q¹ is 9, T1′ is 2′-F, q² is 1, B2′ is 2′-OMe or 2′-F, q³ is 4, T2′ is 2′-F, q⁴ is 2, B3′ is 2′-OMe or 2′-F, q⁵ is 5, T3′ is 2′-F, q⁶ is 1, B4′ is 2′-OMe, and q⁷ is 1; with two phosphorothioate internucleotide linkage modifications within position 1-5 of the sense strand (counting from the 5′-end of the sense strand), and two phosphorothioate internucleotide linkage modifications at positions 1 and 2 and two phosphorothioate internucleotide linkage modifications within positions 18-23 of the antisense strand (counting from the 5′-end of the antisense strand). The RNAi agent also comprises a 5′-PS₂ and a targeting ligand. In one embodiment, the 5′-PS₂ is at the 5′-end of the antisense strand, and the targeting ligand is at the 3′-end of the sense strand.

[0479] In one embodiment, B1 is 2′-OMe or 2′-F, n¹ is 8, T1 is 2′F, n² is 3, B2 is 2′-OMe, n³ is 7, n⁴ is 0, B3 is 2′-OMe, n⁵ is 3, B1′ is 2′-OMe or 2′-F, q¹ is 9, T1′ is 2′-F, q² is 1, B2′ is 2′-OMe or 2′-F, q³ is 4, T2′ is 2′-F, q⁴ is 2, B3′ is 2′-OMe or 2′-F, q⁵ is 5, T3′ is 2′-F, q⁶ is 1, B4′ is 2′-OMe, and q⁷ is 1; with two phosphorothioate internucleotide linkage modifications within position 1-5 of the sense strand (counting from the 5′-end of the sense strand), and two phosphorothioate internucleotide linkage modifications at positions 1 and 2 and two phosphorothioate internucleotide linkage modifications within positions 18-23 of the antisense strand (counting from the 5′-end of the antisense strand). The RNAi agent also comprises a 5′-deoxy-5′-C-malonyl and a targeting ligand. In one embodiment, the 5′-deoxy-5′-C-malonyl is at the 5′-end of the antisense strand, and the targeting ligand is at the 3′-end of the sense strand.

[0480] In one embodiment, B1 is 2′-OMe or 2′-F, n¹ is 8, T1 is 2′F, n² is 3, B2 is 2′-OMe, n³ is 7, n⁴ is 0, B3 is 2′-OMe, n⁵ is 3, B1′ is 2′-OMe or 2′-F, q¹ is 9, T1′ is 2′-F, q² is 1, B2′ is 2′-OMe or 2′-F, q³ is 4, q⁴ is 0, B3′ is 2′-OMe or 2′-F, q⁵ is 7, T3′ is 2′-F, q⁶ is 1, B4′ is 2′-OMe, and q⁷ is 1; with two phosphorothioate internucleotide linkage modifications within position 1-5 of the sense strand (counting from the 5′-end), and two phosphorothioate internucleotide linkage modifications at positions 1 and 2 and two phosphorothioate internucleotide linkage modifications within positions 18-23 of the antisense strand (counting from the 5′-end). The RNAi agent also comprises a 5′-P and a targeting ligand. In one embodiment, the 5′-P is at the 5′-end of the antisense strand, and the targeting ligand is at the 3′-end of the sense strand.

[0481] In one embodiment, B1 is 2′-OMe or 2′-F, n¹ is 8, T1 is 2′F, n² is 3, B2 is 2′-OMe, n³ is 7, n⁴ is 0, B3 is 2′-OMe, n⁵ is 3, B1′ is 2′-OMe or 2′-F, q¹ is 9, T1′ is 2′-F, q² is 1, B2′ is 2′-OMe or 2′-F, q³ is 4, q⁴ is 0, B3′ is 2′-OMe or 2′-F, q⁵ is 7, T3′ is 2′-F, q⁶ is 1, B4′ is 2′-OMe, and q⁷ is 1; with two phosphorothioate internucleotide linkage modifications within position 1-5 of the sense strand (counting from the 5′-end), and two phosphorothioate internucleotide linkage modifications at positions 1 and 2 and two phosphorothioate internucleotide linkage modifications within positions 18-23 of the antisense strand (counting from the 5′-end). The RNAi agent also comprises a 5′-PS and a targeting ligand. In one embodiment, the 5′-PS is at the 5′-end of the antisense strand, and the targeting ligand is at the 3′-end of the sense strand.

[0482] In one embodiment, B1 is 2′-OMe or 2′-F, n¹ is 8, T1 is 2′F, n² is 3, B2 is 2′-OMe, n³ is 7, n⁴ is 0, B3 is 2′-OMe, n⁵ is 3, B1′ is 2′-OMe or 2′-F, q¹ is 9, T1′ is 2′-F, q² is 1, B2′ is 2′-OMe or 2′-F, q³ is 4, q⁴ is 0, B3′ is 2′-OMe or 2′-F, q⁵ is 7, T3′ is 2′-F, q⁶ is 1, B4′ is 2′-OMe, and q⁷ is 1; with two phosphorothioate internucleotide linkage modifications within position 1-5 of the sense strand (counting from the 5′-end), and two phosphorothioate internucleotide linkage modifications at positions 1 and 2 and two phosphorothioate internucleotide linkage modifications within positions 18-23 of the antisense strand (counting from the 5′-end). The RNAi agent also comprises a 5′-VP (e.g., a 5′-E-VP, 5′-Z-VP, or combination thereof) and a targeting ligand. In one embodiment, the 5′-VP is at the 5′-end of the antisense strand, and the targeting ligand is at the 3′-end of the sense strand.

[0483] In one embodiment, B1 is 2′-OMe or 2′-F, n¹ is 8, T1 is 2′F, n² is 3, B2 is 2′-OMe, n³ is 7, n⁴ is 0, B3 is 2′-OMe, n⁵ is 3, B1′ is 2′-OMe or 2′-F, q¹ is 9, T1′ is 2′-F, q² is 1, B2′ is 2′-OMe or 2′-F, q³ is 4, q⁴ is 0, B3′ is 2′-OMe or 2′-F, q⁵ is 7, T3′ is 2′-F, q⁶ is 1, B4′ is 2′-OMe, and q⁷ is 1; with two phosphorothioate internucleotide linkage modifications within position 1-5 of the sense strand (counting from the 5′-end), and two phosphorothioate internucleotide linkage modifications at positions 1 and 2 and two phosphorothioate internucleotide linkage modifications within positions 18-23 of the antisense strand (counting from the 5′-end). The RNAi agent also comprises a 5′-PS₂ and a targeting ligand. In one embodiment, the 5′-PS₂ is at the 5′-end of the antisense strand, and the targeting ligand is at the 3′-end of the sense strand.

[0484] In one embodiment, B1 is 2′-OMe or 2′-F, n¹ is 8, T1 is 2′F, n² is 3, B2 is 2′-OMe, n³ is 7, n⁴ is 0, B3 is 2′-OMe, n⁵ is 3, B1′ is 2′-OMe or 2′-F, q¹ is 9, T1′ is 2′-F, q² is 1, B2′ is 2′-OMe or 2′-F, q³ is 4, q⁴ is 0, B3′ is 2′-OMe or 2′-F, q⁵ is 7, T3′ is 2′-F, q⁶ is 1, B4′ is 2′-OMe, and q⁷ is 1; with two phosphorothioate internucleotide linkage modifications within position 1-5 of the sense strand (counting from the 5′-end), and two phosphorothioate internucleotide linkage modifications at positions 1 and 2 and two phosphorothioate internucleotide linkage modifications within positions 18-23 of the antisense strand (counting from the 5′-end). The RNAi agent also comprises a 5′-deoxy-5′-C-malonyl and a targeting ligand. In one embodiment, the 5′-deoxy-5′-C-malonyl is at the 5′-end of the antisense strand, and the targeting ligand is at the 3′-end of the sense strand.

[0485] In one embodiment, B1 is 2′-OMe or 2′-F, n¹ is 8, T1 is 2′F, n² is 3, B2 is 2′-OMe, n³ is 7, n⁴ is 0, B3 is 2′-OMe, n⁵ is 3, B1′ is 2′-OMe or 2′-F, q¹ is 9, T1′ is 2′-F, q² is 1, B2′ is 2′-OMe or 2′-F, q³ is 4, T2′ is 2′-F, q⁴ is 2, B3′ is 2′-OMe or 2′-F, q⁵ is 5, T3′ is 2′-F, q⁶ is 1, B4′ is 2′-F, and q⁷ is 1; with two phosphorothioate internucleotide linkage modifications within position 1-5 of the sense strand (counting from the 5′-end of the sense strand), and two phosphorothioate internucleotide linkage modifications at positions 1 and 2 and two phosphorothioate internucleotide linkage modifications within positions 18-23 of the antisense strand (counting from the 5′-end of the antisense strand). The RNAi agent also comprises a 5′-P and a targeting ligand. In one embodiment, the 5′-P is at the 5′-end of the antisense strand, and the targeting ligand is at the 3′-end of the sense strand.

[0486] In one embodiment, B1 is 2′-OMe or 2′-F, n¹ is 8, T1 is 2′F, n² is 3, B2 is 2′-OMe, n³ is 7, n⁴ is 0, B3 is 2′-OMe, n⁵ is 3, B1′ is 2′-OMe or 2′-F, q¹ is 9, T1′ is 2′-F, q² is 1, B2′ is 2′-OMe or 2′-F, q³ is 4, T2′ is 2′-F, q⁴ is 2, B3′ is 2′-OMe or 2′-F, q⁵ is 5, T3′ is 2′-F, q⁶ is 1, B4′ is 2′-F, and q⁷ is 1; with two phosphorothioate internucleotide linkage modifications within position 1-5 of the sense strand (counting from the 5′-end of the sense strand), and two phosphorothioate internucleotide linkage modifications at positions 1 and 2 and two phosphorothioate internucleotide linkage modifications within positions 18-23 of the antisense strand (counting from the 5′-end of the antisense strand). The RNAi agent also comprises a 5′-PS and a targeting ligand. In one embodiment, the 5′-PS is at the 5′-end of the antisense strand, and the targeting ligand is at the 3′-end of the sense strand.

[0487] In one embodiment, B1 is 2′-OMe or 2′-F, n¹ is 8, T1 is 2′F, n² is 3, B2 is 2′-OMe, n³ is 7, n⁴ is 0, B3 is 2′-OMe, n⁵ is 3, B1′ is 2′-OMe or 2′-F, q¹ is 9, T1′ is 2′-F, q² is 1, B2′ is 2′-OMe or 2′-F, q³ is 4, T2′ is 2′-F, q⁴ is 2, B3′ is 2′-OMe or 2′-F, q⁵ is 5, T3′ is 2′-F, q⁶ is 1, B4′ is 2′-F, and q⁷ is 1; with two phosphorothioate internucleotide linkage modifications within position 1-5 of the sense strand (counting from the 5′-end of the sense strand), and two phosphorothioate internucleotide linkage modifications at positions 1 and 2 and two phosphorothioate internucleotide linkage modifications within positions 18-23 of the antisense strand (counting from the 5′-end of the antisense strand). The RNAi agent also comprises a 5′-VP (e.g., a 5′-E-VP, 5′-Z-VP, or combination thereof) and a targeting ligand. In one embodiment, the 5′-VP is at the 5′-end of the antisense strand, and the targeting ligand is at the 3′-end of the sense strand.

[0488] In one embodiment, B1 is 2′-OMe or 2′-F, n¹ is 8, T1 is 2′F, n² is 3, B2 is 2′-OMe, n³ is 7, n⁴ is 0, B3 is 2′-OMe, n⁵ is 3, B1′ is 2′-OMe or 2′-F, q¹ is 9, T1′ is 2′-F, q² is 1, B2′ is 2′-OMe or 2′-F, q³ is 4, T2′ is 2′-F, q⁴ is 2, B3′ is 2′-OMe or 2′-F, q⁵ is 5, T3′ is 2′-F, q⁶ is 1, B4′ is 2′-F, and q⁷ is 1; with two phosphorothioate internucleotide linkage modifications within position 1-5 of the sense strand (counting from the 5′-end of the sense strand), and two phosphorothioate internucleotide linkage modifications at positions 1 and 2 and two phosphorothioate internucleotide linkage modifications within positions 18-23 of the antisense strand (counting from the 5′-end of the antisense strand). The RNAi agent also comprises a 5′-PS₂ and a targeting ligand. In one embodiment, the 5′-PS₂ is at the 5′-end of the antisense strand, and the targeting ligand is at the 3′-end of the sense strand.

[0489] In one embodiment, B1 is 2′-OMe or 2′-F, n¹ is 8, T1 is 2′F, n² is 3, B2 is 2′-OMe, n³ is 7, n⁴ is 0, B3 is 2′-OMe, n⁵ is 3, B1′ is 2′-OMe or 2′-F, q¹ is 9, T1′ is 2′-F, q² is 1, B2′ is 2′-OMe or 2′-F, q³ is 4, T2′ is 2′-F, q⁴ is 2, B3′ is 2′-OMe or 2′-F, q⁵ is 5, T3′ is 2′-F, q⁶ is 1, B4′ is 2′-F, and q⁷ is 1; with two phosphorothioate internucleotide linkage modifications within position 1-5 of the sense strand (counting from the 5′-end of the sense strand), and two phosphorothioate internucleotide linkage modifications at positions 1 and 2 and two phosphorothioate internucleotide linkage modifications within positions 18-23 of the antisense strand (counting from the 5′-end of the antisense strand). The RNAi agent also comprises a 5′-deoxy-5′-C-malonyl and a targeting ligand. In one embodiment, the 5′-deoxy-5′-C-malonyl is at the 5′-end of the antisense strand, and the targeting ligand is at the 3′-end of the sense strand.

[0490] In one embodiment, B1 is 2′-OMe or 2′-F, n¹ is 8, T1 is 2′F, n² is 3, B2 is 2′-OMe, n³ is 7, n⁴ is 0, B3 is 2′-OMe, n⁵ is 3, B1′ is 2′-OMe or 2′-F, q¹ is 9, T1′ is 2′-F, q² is 1, B2′ is 2′-OMe or 2′-F, q³ is 4, q⁴ is 0, B3′ is 2′-OMe or 2′-F, q⁵ is 7, T3′ is 2′-F, q⁶ is 1, B4′ is 2′-F, and q⁷ is 1; with two phosphorothioate internucleotide linkage modifications within position 1-5 of the sense strand (counting from the 5′-end of the sense strand), and two phosphorothioate internucleotide linkage modifications at positions 1 and 2 and two phosphorothioate internucleotide linkage modifications within positions 18-23 of the antisense strand (counting from the 5′-end of the antisense strand). The RNAi agent also comprises a 5′-P and a targeting ligand. In one embodiment, the 5′-P is at the 5′-end of the antisense strand, and the targeting ligand is at the 3′-end of the sense strand.

[0491] In one embodiment, B1 is 2′-OMe or 2′-F, n¹ is 8, T1 is 2′F, n² is 3, B2 is 2′-OMe, n³ is 7, n⁴ is 0, B3 is 2′-OMe, n⁵ is 3, B1′ is 2′-OMe or 2′-F, q¹ is 9, T1′ is 2′-F, q² is 1, B2′ is 2′-OMe or 2′-F, q³ is 4, q⁴ is 0, B3′ is 2′-OMe or 2′-F, q⁵ is 7, T3′ is 2′-F, q⁶ is 1, B4′ is 2′-F, and q⁷ is 1; with two phosphorothioate internucleotide linkage modifications within position 1-5 of the sense strand (counting from the 5′-end of the sense strand), and two phosphorothioate internucleotide linkage modifications at positions 1 and 2 and two phosphorothioate internucleotide linkage modifications within positions 18-23 of the antisense strand (counting from the 5′-end of the antisense strand). The RNAi agent also comprises a 5′-PS and a targeting ligand. In one embodiment, the 5′-PS is at the 5′-end of the antisense strand, and the targeting ligand is at the 3′-end of the sense strand.

[0492] In one embodiment, B1 is 2′-OMe or 2′-F, n¹ is 8, T1 is 2′F, n² is 3, B2 is 2′-OMe, n³ is 7, n⁴ is 0, B3 is 2′-OMe, n⁵ is 3, B1′ is 2′-OMe or 2′-F, q¹ is 9, T1′ is 2′-F, q² is 1, B2′ is 2′-OMe or 2′-F, q³ is 4, q⁴ is 0, B3′ is 2′-OMe or 2′-F, q⁵ is 7, T3′ is 2′-F, q⁶ is 1, B4′ is 2′-F, and q⁷ is 1; with two phosphorothioate internucleotide linkage modifications within position 1-5 of the sense strand (counting from the 5′-end of the sense strand), and two phosphorothioate internucleotide linkage modifications at positions 1 and 2 and two phosphorothioate internucleotide linkage modifications within positions 18-23 of the antisense strand (counting from the 5′-end of the antisense strand). The RNAi agent also comprises a 5′-V P (e.g., a 5′-E-VP, 5′-Z-VP, or combination thereof) and a targeting ligand. In one embodiment, the 5′-VP is at the 5′-end of the antisense strand, and the targeting ligand is at the 3′-end of the sense strand.

[0493] In one embodiment, B1 is 2′-OMe or 2′-F, n¹ is 8, T1 is 2′F, n² is 3, B2 is 2′-OMe, n³ is 7, n⁴ is 0, B3 is 2′-OMe, n⁵ is 3, B1′ is 2′-OMe or 2′-F, q¹ is 9, T1′ is 2′-F, q² is 1, B2′ is 2′-OMe or 2′-F, q³ is 4, q⁴ is 0, B3′ is 2′-OMe or 2′-F, q⁵ is 7, T3′ is 2′-F, q⁶ is 1, B4′ is 2′-F, and q⁷ is 1; with two phosphorothioate internucleotide linkage modifications within position 1-5 of the sense strand (counting from the 5′-end of the sense strand), and two phosphorothioate internucleotide linkage modifications at positions 1 and 2 and two phosphorothioate internucleotide linkage modifications within positions 18-23 of the antisense strand (counting from the 5′-end of the antisense strand). The RNAi agent also comprises a 5′-PS₂ and a targeting ligand. In one embodiment, the 5′-PS₂ is at the 5′-end of the antisense strand, and the targeting ligand is at the 3′-end of the sense strand.

[0494] In one embodiment, B1 is 2′-OMe or 2′-F, n¹ is 8, T1 is 2′F, n² is 3, B2 is 2′-OMe, n³ is 7, n⁴ is 0, B3 is 2′-OMe, n⁵ is 3, B1′ is 2′-OMe or 2′-F, q¹ is 9, T1′ is 2′-F, q² is 1, B2′ is 2′-OMe or 2′-F, q³ is 4, q⁴ is 0, B3′ is 2′-OMe or 2′-F, q⁵ is 7, T3′ is 2′-F, q⁶ is 1, B4′ is 2′-F, and q⁷ is 1; with two phosphorothioate internucleotide linkage modifications within position 1-5 of the sense strand (counting from the 5′-end of the sense strand), and two phosphorothioate internucleotide linkage modifications at positions 1 and 2 and two phosphorothioate internucleotide linkage modifications within positions 18-23 of the antisense strand (counting from the 5′-end of the antisense strand). The RNAi agent also comprises a 5′-deoxy-5′-C-malonyl and a targeting ligand. In one embodiment, the 5′-deoxy-5′-C-malonyl is at the 5′-end of the antisense strand, and the targeting ligand is at the 3′-end of the sense strand.

[0495] In a particular embodiment, an RNAi agent of the present invention comprises:
[0496] (a) a sense strand having:
   [0497] (i) a length of 21 nucleotides;
   [0498] (ii) an ASGPR ligand attached to the 3′-end, wherein said ASGPR ligand comprises three GalNAc derivatives attached through a trivalent branched linker; and
   [0499] (iii) 2′-F modifications at positions 1, 3, 5, 7, 9 to 11, 13, 17, 19, and 21, and 2′-OMe modifications at positions 2, 4, 6, 8, 12, 14 to 16, 18, and 20 (counting from the 5′ end);
[0500] and
[0501] (b) an antisense strand having:
   [0502] (i) a length of 23 nucleotides;
   [0503] (ii) 2′-OMe modifications at positions 1, 3, 5, 9, 11 to 13, 15, 17, 19, 21, and 23, and 2′F modifications at positions 2, 4, 6 to 8, 10, 14, 16, 18, 20, and 22 (counting from the 5′ end); and
   [0504] (iii) phosphorothioate internucleotide linkages between nucleotide positions 21 and 22, and between nucleotide positions 22 and 23 (counting from the 5′ end);
[0505] wherein the dsRNA agents have a two nucleotide overhang at the 3′-end of the antisense strand, and a blunt end at the 5′-end of the antisense strand.

[0506] In another particular embodiment, an RNAi agent of the present invention comprises:
[0507] (a) a sense strand having:
   [0508] (i) a length of 21 nucleotides;
   [0509] (ii) an ASGPR ligand attached to the 3′-end, wherein said ASGPR ligand comprises three GalNAc derivatives attached through a trivalent branched linker;
   [0510] (iii) 2′-F modifications at positions 1, 3, 5, 7, 9 to 11, 13, 15, 17, 19, and 21, and 2′-OMe modifications at positions 2, 4, 6, 8, 12, 14, 16, 18, and 20 (counting from the 5′ end); and
   [0511] (iv) phosphorothioate internucleotide linkages between nucleotide positions 1 and 2, and between nucleotide positions 2 and 3 (counting from the 5′ end);
[0512] and
[0513] (b) an antisense strand having:
   [0514] (i) a length of 23 nucleotides;
   [0515] (ii) 2′-OMe modifications at positions 1, 3, 5, 7, 9, 11 to 13, 15, 17, 19, and 21 to 23, and 2′F modifications at positions 2, 4, 6, 8, 10, 14, 16, 18, and 20 (counting from the 5′ end); and
   [0516] (iii) phosphorothioate internucleotide linkages between nucleotide positions 1 and 2, between nucleotide positions 2 and 3, between nucleotide positions 21 and 22, and between nucleotide positions 22 and 23 (counting from the 5′ end);
      wherein the RNAi agents have a two nucleotide overhang at the 3′-end of the antisense strand, and a blunt end at the 5′-end of the antisense strand.

[0517] In another particular embodiment, a RNAi agent of the present invention comprises:
[0518] (a) a sense strand having:
   [0519] (i) a length of 21 nucleotides;
   [0520] (ii) an ASGPR ligand attached to the 3′-end, wherein said ASGPR ligand comprises three GalNAc derivatives attached through a trivalent branched linker;
   [0521] (iii) 2′-OMe modifications at positions 1 to 6, 8, 10, and 12 to 21, 2′-F modifications at positions 7, and 9, and a deoxy-nucleotide (e.g. dT) at position 11 (counting from the 5′ end); and
   [0522] (iv) phosphorothioate internucleotide linkages between nucleotide positions 1 and 2, and between nucleotide positions 2 and 3 (counting from the 5′ end);
[0523] and
[0524] (b) an antisense strand having:
   [0525] (i) a length of 23 nucleotides;
   [0526] (ii) 2′-OMe modifications at positions 1, 3, 7, 9, 11, 13, 15, 17, and 19 to 23, and 2′-F modifications at positions 2, 4 to 6, 8, 10, 12, 14, 16, and 18 (counting from the 5′ end); and
   [0527] (iii) phosphorothioate internucleotide linkages between nucleotide positions 1 and 2, between nucleotide positions 2 and 3, between nucleotide positions 21 and 22, and between nucleotide positions 22 and 23 (counting from the 5′ end);
      wherein the RNAi agents have a two nucleotide overhang at the 3′-end of the antisense strand, and a blunt end at the 5′-end of the antisense strand.

[0528] In another particular embodiment, a RNAi agent of the present invention comprises:
[0529] (a) a sense strand having:
   [0530] (i) a length of 21 nucleotides;
   [0531] (ii) an ASGPR ligand attached to the 3′-end, wherein said ASGPR ligand comprises three GalNAc derivatives attached through a trivalent branched linker;
   [0532] (iii) 2′-OMe modifications at positions 1 to 6, 8, 10, 12, 14, and 16 to 21, and 2′-F modifications at positions 7, 9, 11, 13, and 15; and
   [0533] (iv) phosphorothioate internucleotide linkages between nucleotide positions 1 and 2, and between nucleotide positions 2 and 3 (counting from the 5′ end);
[0534] and
[0535] (b) an antisense strand having:
   [0536] (i) a length of 23 nucleotides;
   [0537] (ii) 2′-OMe modifications at positions 1, 5, 7, 9, 11, 13, 15, 17, 19, and 21 to 23, and 2′-F modifications at positions 2 to 4, 6, 8, 10, 12, 14, 16, 18, and 20 (counting from the 5′ end); and
   [0538] (iii) phosphorothioate internucleotide linkages between nucleotide positions 1 and 2, between nucleotide positions 2 and 3, between nucleotide positions 21 and 22, and between nucleotide positions 22 and 23 (counting from the 5′ end);
      wherein the RNAi agents have a two nucleotide overhang at the 3′-end of the antisense strand, and a blunt end at the 5′-end of the antisense strand.

[0539] In another particular embodiment, a RNAi agent of the present invention comprises:
[0540] (a) a sense strand having:
   [0541] (i) a length of 21 nucleotides;
   [0542] (ii) an ASGPR ligand attached to the 3′-end, wherein said ASGPR ligand comprises three GalNAc derivatives attached through a trivalent branched linker;
   [0543] (iii) 2′-OMe modifications at positions 1 to 9, and 12 to 21, and 2′-F modifications at positions 10, and 11; and
   [0544] (iv) phosphorothioate internucleotide linkages between nucleotide positions 1 and 2, and between nucleotide positions 2 and 3 (counting from the 5′ end);
[0545] and
[0546] (b) an antisense strand having:
   [0547] (i) a length of 23 nucleotides;
   [0548] (ii) 2′-OMe modifications at positions 1, 3, 5, 7, 9, 11 to 13, 15, 17, 19, and 21 to 23, and 2′-F modifications at positions 2, 4, 6, 8, 10, 14, 16, 18, and 20 (counting from the 5′ end); and
   [0549] (iii) phosphorothioate internucleotide linkages between nucleotide positions 1 and 2, between nucleotide positions 2 and 3, between nucleotide positions 21 and 22, and between nucleotide positions 22 and 23 (counting from the 5′ end);
      wherein the RNAi agents have a two nucleotide overhang at the 3′-end of the antisense strand, and a blunt end at the 5′-end of the antisense strand.

[0550] In another particular embodiment, a RNAi agent of the present invention comprises:
[0551] (a) a sense strand having:
   [0552] (i) a length of 21 nucleotides;
   [0553] (ii) an ASGPR ligand attached to the 3′-end, wherein said ASGPR ligand comprises three GalNAc derivatives attached through a trivalent branched linker;
   [0554] (iii) 2′-F modifications at positions 1, 3, 5, 7, 9 to 11, and 13, and 2′-OMe modifications at positions 2, 4, 6, 8, 12, and 14 to 21; and
   [0555] (iv) phosphorothioate internucleotide linkages between nucleotide positions 1 and 2, and between nucleotide positions 2 and 3 (counting from the 5′ end);
[0556] and
[0557] (b) an antisense strand having:
   [0558] (i) a length of 23 nucleotides;
   [0559] (ii) 2′-OMe modifications at positions 1, 3, 5 to 7, 9, 11 to 13, 15, 17 to 19, and 21 to 23, and 2′-F modifications at positions 2, 4, 8, 10, 14, 16, and 20 (counting from the 5′ end); and
   [0560] (iii) phosphorothioate internucleotide linkages between nucleotide positions 1 and 2, between nucleotide positions 2 and 3, between nucleotide positions 21 and 22, and between nucleotide positions 22 and 23 (counting from the 5′ end);
      wherein the RNAi agents have a two nucleotide overhang at the 3′-end of the antisense strand, and a blunt end at the 5′-end of the antisense strand.

[0561] In another particular embodiment, a RNAi agent of the present invention comprises:
[0562] (a) a sense strand having:
   [0563] (i) a length of 21 nucleotides;
   [0564] (ii) an ASGPR ligand attached to the 3′-end, wherein said ASGPR ligand comprises three GalNAc derivatives attached through a trivalent branched linker;
   [0565] (iii) 2′-OMe modifications at positions 1, 2, 4, 6, 8, 12, 14, 15, 17, and 19 to 21, and 2′-F modifications at positions 3, 5, 7, 9 to 11, 13, 16, and 18; and
   [0566] (iv) phosphorothioate internucleotide linkages between nucleotide positions 1 and 2, and between nucleotide positions 2 and 3 (counting from the 5′ end);
[0567] and
[0568] (b) an antisense strand having:
   [0569] (i) a length of 25 nucleotides;
   [0570] (ii) 2′-OMe modifications at positions 1, 4, 6, 7, 9, 11 to 13, 15, 17, and 19 to 23, 2′-F modifications at positions 2, 3, 5, 8, 10, 14, 16, and 18, and desoxy-nucleotides (e.g. dT) at positions 24 and 25 (counting from the 5′ end); and
   [0571] (iii) phosphorothioate internucleotide linkages between nucleotide positions 1 and 2, between nucleotide positions 2 and 3, between nucleotide positions 21 and 22, and between nucleotide positions 22 and 23 (counting from the 5′ end);
      wherein the RNAi agents have a four nucleotide overhang at the 3′-end of the antisense strand, and a blunt end at the 5′-end of the antisense strand.

[0572] In another particular embodiment, a RNAi agent of the present invention comprises:
[0573] (a) a sense strand having:
   [0574] (i) a length of 21 nucleotides;
   [0575] (ii) an ASGPR ligand attached to the 3′-end, wherein said ASGPR ligand comprises three GalNAc derivatives attached through a trivalent branched linker;
   [0576] (iii) 2′-OMe modifications at positions 1 to 6, 8, and 12 to 21, and 2′-F modifications at positions 7, and 9 to 11; and
   [0577] (iv) phosphorothioate internucleotide linkages between nucleotide positions 1 and 2, and between nucleotide positions 2 and 3 (counting from the 5′ end);
[0578] and
[0579] (b) an antisense strand having:
   [0580] (i) a length of 23 nucleotides;
   [0581] (ii) 2′-OMe modifications at positions 1, 3 to 5, 7, 8, 10 to 13, 15, and 17 to 23, and 2′-F modifications at positions 2, 6, 9, 14, and 16 (counting from the 5′ end); and
   [0582] (iii) phosphorothioate internucleotide linkages between nucleotide positions 1 and 2, between nucleotide positions 2 and 3, between nucleotide positions 21 and 22, and between nucleotide positions 22 and 23 (counting from the 5′ end);
      wherein the RNAi agents have a two nucleotide overhang at the 3′-end of the antisense strand, and a blunt end at the 5′-end of the antisense strand.

[0583] In another particular embodiment, a RNAi agent of the present invention comprises:
[0584] (a) a sense strand having:
   [0585] (i) a length of 21 nucleotides;
   [0586] (ii) an ASGPR ligand attached to the 3′-end, wherein said ASGPR ligand comprises three GalNAc derivatives attached through a trivalent branched linker;
   [0587] (iii) 2′-OMe modifications at positions 1 to 6, 8, and 12 to 21, and 2′-F modifications at positions 7, and 9 to 11; and
   [0588] (iv) phosphorothioate internucleotide linkages between nucleotide positions 1 and 2, and between nucleotide positions 2 and 3 (counting from the 5′ end);
[0589] and
[0590] (b) an antisense strand having:
   [0591] (i) a length of 23 nucleotides;
   [0592] (ii) 2′-OMe modifications at positions 1, 3 to 5, 7, 10 to 13, 15, and 17 to 23, and 2′-F modifications at positions 2, 6, 8, 9, 14, and 16 (counting from the 5′ end); and
   [0593] (iii) phosphorothioate internucleotide linkages between nucleotide positions 1 and 2, between nucleotide positions 2 and 3, between nucleotide positions 21 and 22, and between nucleotide positions 22 and 23 (counting from the 5′ end);
      wherein the RNAi agents have a two nucleotide overhang at the 3′-end of the antisense strand, and a blunt end at the 5′-end of the antisense strand.

[0594] In another particular embodiment, a RNAi agent of the present invention comprises:
[0595] (a) a sense strand having:
   [0596] (i) a length of 19 nucleotides;
   [0597] (ii) an ASGPR ligand attached to the 3′-end, wherein said ASGPR ligand comprises three GalNAc derivatives attached through a trivalent branched linker;
   [0598] (iii) 2′-OMe modifications at positions 1 to 4, 6, and 10 to 19, and 2′-F modifications at positions 5, and 7 to 9; and
   [0599] (iv) phosphorothioate internucleotide linkages between nucleotide positions 1 and 2, and between nucleotide positions 2 and 3 (counting from the 5′ end);
[0600] and
[0601] (b) an antisense strand having:
   [0602] (i) a length of 21 nucleotides;
   [0603] (ii) 2′-OMe modifications at positions 1, 3 to 5, 7, 10 to 13, 15, and 17 to 21, and 2′-F modifications at positions 2, 6, 8, 9, 14, and 16 (counting from the 5′ end); and
   [0604] (iii) phosphorothioate internucleotide linkages between nucleotide positions 1 and 2, between nucleotide positions 2 and 3, between nucleotide positions 19 and 20, and between nucleotide positions 20 and 21 (counting from the 5′ end);
      wherein the RNAi agents have a two nucleotide overhang at the 3′-end of the antisense strand, and a blunt end at the 5′-end of the antisense strand.

[0605] In certain embodiments, the iRNA for use in the methods of the invention is an agent selected from agents listed in any one of Tables 2-5, 14, and 15. These agents may further comprise a ligand.

### III. iRNAs Conjugated to Ligands

[0606] Another modification of the RNA of an iRNA of the invention involves chemically linking to the iRNA one or more ligands, moieties or conjugates that enhance the activity, cellular distribution, or cellular uptake of the iRNA e.g., into a cell. Such moieties include but are not limited to lipid moieties such as a cholesterol moiety (Letsinger et al., Proc. Natl. Acid. Sci. USA, 1989, 86: 6553-6556). In other embodiments, the ligand is cholic acid (Manoharan et al., Biorg. Med. Chem. Let., 1994, 4:1053-1060), a thioether, e.g., beryl-S-tritylthiol (Manoharan et al., Ann. N.Y. Acad. Sci., 1992, 660:306-309; Manoharan et al., Biorg. Med. Chem. Let., 1993, 3:2765-2770), a thiocholesterol (Oberhauser et al., Nucl. Acids Res., 1992, 20:533-538), an aliphatic chain, e.g., dodecandiol or undecyl residues (Saison-Behmoaras et al., EMBO J, 1991, 10:1111-1118; Kabanov et al., FEBS Lett., 1990, 259:327-330; Svinarchuk et al., Biochimie, 1993, 75:49-54), a phospholipid, e.g., di-hexadecyl-rac-glycerol or triethyl-ammonium 1,2-di-O-hexadecyl-rac-glycero-3-phosphonate (Manoharan et al., Tetrahedron Lett., 1995, 36:3651-3654; Shea et al., Nucl. Acids Res., 1990, 18:3777-3783), a polyamine or a polyethylene glycol chain (Manoharan et al., Nucleosides & Nucleotides, 1995, 14:969-973), or adamantane acetic acid (Manoharan et al., Tetrahedron Lett., 1995, 36:3651-3654), a palmityl moiety (Mishra et al., Biochim. Biophys. Acta, 1995, 1264:229-237), or an octadecylamine or hexylamino-carbonyloxycholesterol moiety (Crooke et al., J. Pharmacol. Exp. Ther., 1996, 277:923-937).

[0607] In certain embodiments, a ligand alters the distribution, targeting, or lifetime of an iRNA agent into which it is incorporated. In preferred embodiments a ligand provides an enhanced affinity for a selected target, e.g., molecule, cell or cell type, compartment, e.g., a cellular or organ compartment, tissue, organ or region of the body, as, e.g., compared to a species absent such a ligand. Preferred ligands do not take part in duplex pairing in a duplexed nucleic acid.

[0608] Ligands can include a naturally occurring substance, such as a protein (e.g., human serum albumin (HSA), low-density lipoprotein (LDL), or globulin); carbohydrate (e.g., a dextran, pullulan, chitin, chitosan, inulin, cyclodextrin, N-acetylglucosamine, N-acetylgalactosamine, or hyaluronic acid); or a lipid. The ligand can also be a recombinant or synthetic molecule, such as a synthetic polymer, e.g., a synthetic polyamino acid. Examples of polyamino acids include polyamino acid is a polylysine (PLL), poly L-aspartic acid, poly L-glutamic acid, styrene-maleic acid anhydride copolymer, poly(L-lactide-co-glycolied) copolymer, divinyl ether-maleic anhydride copolymer, N-(2-hydroxypropyl)methacrylamide copolymer (HMPA), polyethylene glycol (PEG), polyvinyl alcohol (PVA), polyurethane, poly(2-ethylacryllic acid), N-isopropylacrylamide polymers, or polyphosphazine. Example of polyamines include: polyethylenimine, polylysine (PLL), spermine, spermidine, polyamine, pseudopeptide-polyamine, peptidomimetic polyamine, dendrimer polyamine, arginine, amidine, protamine, cationic lipid, cationic porphyrin, quaternary salt of a polyamine, or an alpha helical peptide.

[0609] Ligands can also include targeting groups, e.g., a cell or tissue targeting agent, e.g., a lectin, glycoprotein, lipid or protein, e.g., an antibody, that binds to a specified cell type such as a kidney cell. A targeting group can be a thyrotropin, melanotropin, lectin, glycoprotein, surfactant protein A, Mucin carbohydrate, multivalent lactose, multivalent galactose, N-acetyl-galactosamine, N-acetyl-glucosamine multivalent mannose, multivalent fucose, glycosylated polyaminoacids, multivalent galactose, transferrin, bisphosphonate, polyglutamate, polyaspartate, a lipid, cholesterol, a steroid, bile acid, folate, vitamin B12, vitamin A, biotin, or an RGD peptide or RGD peptide mimetic. In certain embodiments, the ligand is a multivalent galactose, e.g., an N-acetyl-galactosamine.

[0610] Other examples of ligands include dyes, intercalating agents (e.g. acridines), cross-linkers (e.g. psoralene, mitomycin C), porphyrins (TPPC4, texaphyrin, Sapphyrin), polycyclic aromatic hydrocarbons (e.g., phenazine, dihydrophenazine), artificial endonucleases (e.g. EDTA), lipophilic molecules, e.g., cholesterol, cholic acid, adamantane acetic acid, 1-pyrene butyric acid, dihydrotestosterone, 1,3-Bis-O(hexadecyl)glycerol, geranyloxyhexyl group, hexadecylglycerol, borneol, menthol, 1,3-propanediol, heptadecyl group, palmitic acid, myristic acid, O3-(oleoyl)lithocholic acid, O3-(oleoyl)cholenic acid, dimethoxytrityl, or phenoxazine) and peptide conjugates (e.g., antennapedia peptide, Tat peptide), alkylating agents, phosphate, amino, mercapto, PEG (e.g., PEG-40K), MPEG, [MPEG]₂, polyamino, alkyl, substituted alkyl, radiolabeled markers, enzymes, haptens (e.g. biotin), transport/absorption facilitators (e.g., aspirin, vitamin E, folic acid), synthetic ribonucleases (e.g., imidazole, bisimidazole, histamine, imidazole clusters, acridine-imidazole conjugates, Eu3+ complexes of tetraazamacrocycles), dinitrophenyl, HRP, or AP.

[0611] Ligands can be proteins, e.g., glycoproteins, or peptides, e.g., molecules having a specific affinity for a co-ligand, or antibodies e.g., an antibody, that binds to a specified cell type such as a hepatic cell. Ligands can also include hormones and hormone receptors. They can also include non-peptidic species, such as lipids, lectins, carbohydrates, vitamins, cofactors, multivalent lactose, multivalent galactose, N-acetyl-galactosamine, N-acetyl-glucosamine multivalent mannose, or multivalent fucose. The ligand can be, for example, a lipopolysaccharide, an activator of p38 MAP kinase, or an activator of NF-κB.

[0612] The ligand can be a substance, e.g., a drug, which can increase the uptake of the iRNA agent into the cell, for example, by disrupting the cell's cytoskeleton, e.g., by disrupting the cell's microtubules, microfilaments, or intermediate filaments. The drug can be, for example, taxol, vincristine, vinblastine, cytochalasin, nocodazole, japlakinolide, latrunculin A, phalloidin, swinholide A, indanocine, or myoservin.

[0613] In some embodiments, a ligand attached to an iRNA as described herein acts as a pharmacokinetic modulator (PK modulator). PK modulators include lipophiles, bile acids, steroids, phospholipid analogues, peptides, protein binding agents, PEG, vitamins, etc. Exemplary PK modulators include, but are not limited to, cholesterol, fatty acids, cholic acid, lithocholic acid, dialkylglycerides, diacylglyceride, phospholipids, sphingolipids, naproxen, ibuprofen, vitamin E, biotin. Oligonucleotides that comprise a number of phosphorothioate linkages are also known to bind to serum protein, thus short oligonucleotides, e.g., oligonucleotides of about 5 bases, 10 bases, 15 bases, or 20 bases, comprising multiple of phosphorothioate linkages in the backbone are also amenable to the present invention as ligands (e.g. as PK modulating ligands). In addition, aptamers that bind serum components (e.g. serum proteins) are also suitable for use as PK modulating ligands in the embodiments described herein.

[0614] Ligand-conjugated iRNAs of the invention may be synthesized by the use of an oligonucleotide that bears a pendant reactive functionality, such as that derived from the attachment of a linking molecule onto the oligonucleotide (described below). This reactive oligonucleotide may be reacted directly with commercially-available ligands, ligands that are synthesized bearing any of a variety of protecting groups, or ligands that have a linking moiety attached thereto.

[0615] The oligonucleotides used in the conjugates of the present invention may be conveniently and routinely made through the well-known technique of solid-phase synthesis. Equipment for such synthesis is sold by several vendors including, for example, Applied Biosystems® (Foster City, Calif.). Any other methods for such synthesis known in the art may additionally or alternatively be employed. It is also known to use similar techniques to prepare other oligonucleotides, such as the phosphorothioates and alkylated derivatives.

[0616] In the ligand-conjugated iRNAs and ligand-molecule bearing sequence-specific linked nucleosides of the present invention, the oligonucleotides and oligonucleosides may be assembled on a suitable DNA synthesizer utilizing standard nucleotide or nucleoside precursors, or nucleotide or nucleoside conjugate precursors that already bear the linking moiety, ligand-nucleotide or nucleoside-conjugate precursors that already bear the ligand molecule, or non-nucleoside ligand-bearing building blocks.

[0617] When using nucleotide-conjugate precursors that already bear a linking moiety, the synthesis of the sequence-specific linked nucleosides is typically completed, and the ligand molecule is then reacted with the linking moiety to form the ligand-conjugated oligonucleotide. In some embodiments, the oligonucleotides or linked nucleosides of the present invention are synthesized by an automated synthesizer using phosphoramidites derived from ligand-nucleoside conjugates in addition to the standard phosphoramidites and non-standard phosphoramidites that are commercially available and routinely used in oligonucleotide synthesis.

### A. Lipid Conjugates

[0618] In certain embodiments, the ligand or conjugate is a lipid or lipid-based molecule. Such a lipid or lipid-based molecule preferably binds a serum protein, e.g., human serum albumin (HSA). An HSA binding ligand allows for distribution of the conjugate to a target tissue, e.g., a non-kidney target tissue of the body. For example, the target tissue can be the liver, including parenchymal cells of the liver. Other molecules that can bind HSA can also be used as ligands. For example, naproxen or aspirin can be used. A lipid or lipid-based ligand can (a) increase resistance to degradation of the conjugate, (b) increase targeting or transport into a target cell or cell membrane, or (c) can be used to adjust binding to a serum protein, e.g., HSA.

[0619] A lipid based ligand can be used to inhibit, e.g., control the binding of the conjugate to a target tissue. For example, a lipid or lipid-based ligand that binds to HSA more strongly will be less likely to be targeted to the kidney and therefore less likely to be cleared from the body. A lipid or lipid-based ligand that binds to HSA less strongly can be used to target the conjugate to the kidney.

[0620] In certain embodiments, the lipid based ligand binds HSA. Preferably, it binds HSA with a sufficient affinity such that the conjugate will be preferably distributed to a non-kidney tissue. However, it is preferred that the affinity not be so strong that the HSA-ligand binding cannot be reversed.

[0621] In other embodiments, the lipid based ligand binds HSA weakly or not at all, such that the conjugate will be preferably distributed to the kidney. Other moieties that target to kidney cells can also be used in place of, or in addition to, the lipid based ligand.

[0622] In another aspect, the ligand is a moiety, e.g., a vitamin, which is taken up by a target cell, e.g., a proliferating cell. These are particularly useful for treating disorders characterized by unwanted cell proliferation, e.g., of the malignant or non-malignant type, e.g., cancer cells. Exemplary vitamins include vitamin A, E, and K. Other exemplary vitamins include are B vitamin, e.g., folic acid, B12, riboflavin, biotin, pyridoxal or other vitamins or nutrients taken up by target cells such as liver cells. Also included are HSA and low density lipoprotein (LDL).

### B. Cell Permeation Agents

[0623] In another aspect, the ligand is a cell-permeation agent, preferably a helical cell-permeation agent. Preferably, the agent is amphipathic. An exemplary agent is a peptide such as tat or antennopedia. If the agent is a peptide, it can be modified, including a peptidylmimetic, invertomers, non-peptide or pseudo-peptide linkages, and use of D-amino acids. The helical agent is preferably an alpha-helical agent, which preferably has a lipophilic and a lipophobic phase.

[0624] The ligand can be a peptide or peptidomimetic. A peptidomimetic (also referred to herein as an oligopeptidomimetic) is a molecule capable of folding into a defined three-dimensional structure similar to a natural peptide. The attachment of peptide and peptidomimetics to iRNA agents can affect pharmacokinetic distribution of the iRNA, such as by enhancing cellular recognition and absorption. The peptide or peptidomimetic moiety can be about 5-50 amino acids long, e.g., about 5, 10, 15, 20, 25, 30, 35, 40, 45, or 50 amino acids long.

[0625] A peptide or peptidomimetic can be, for example, a cell permeation peptide, cationic peptide, amphipathic peptide, or hydrophobic peptide (e.g., consisting primarily of Tyr, Trp, or Phe). The peptide moiety can be a dendrimer peptide, constrained peptide or crosslinked peptide. In another alternative, the peptide moiety can include a hydrophobic membrane translocation sequence (MTS). An exemplary hydrophobic MTS-containing peptide is RFGF having the amino acid sequence AAVALLPAVLLALLAP (SEQ ID NO: 18). An RFGF analogue (e.g., amino acid sequence AALLPVLLAAP (SEQ ID NO:19) containing a hydrophobic MTS can also be a targeting moiety. The peptide moiety can be a “delivery” peptide, which can carry large polar molecules including peptides, oligonucleotides, and protein across cell membranes. For example, sequences from the HIV Tat protein (GRKKRRQRRRPPQ (SEQ ID NO:20) and the Drosophila Antennapedia protein (RQIKIWFQNRRMKWKK (SEQ ID NO:21) have been found to be capable of functioning as delivery peptides. A peptide or peptidomimetic can be encoded by a random sequence of DNA, such as a peptide identified from a phage-display library, or one-bead-one-compound (OBOC) combinatorial library (Lam et al., Nature, 354:82-84, 1991). Examples of a peptide or peptidomimetic tethered to a dsRNA agent via an incorporated monomer unit for cell targeting purposes is an arginine-glycine-aspartic acid (RGD)-peptide, or RGD mimic. A peptide moiety can range in length from about 5 amino acids to about 40 amino acids. The peptide moieties can have a structural modification, such as to increase stability or direct conformational properties. Any of the structural modifications described below can be utilized.

[0626] An RGD peptide for use in the compositions and methods of the invention may be linear or cyclic, and may be modified, e.g., glycosylated or methylated, to facilitate targeting to a specific tissue(s). RGD-containing peptides and peptidiomimemtics may include D-amino acids, as well as synthetic RGD mimics. In addition to RGD, one can use other moieties that target the integrin ligand. Preferred conjugates of this ligand target PECAM-1 or VEGF.

[0627] A “cell permeation peptide” is capable of permeating a cell, e.g., a microbial cell, such as a bacterial or fungal cell, or a mammalian cell, such as a human cell. A microbial cell-permeating peptide can be, for example, an α-helical linear peptide (e.g., LL-37 or Ceropin P1), a disulfide bond-containing peptide (e.g., α-defensin, β-defensin or bactenecin), or a peptide containing only one or two dominating amino acids (e.g., PR-39 or indolicidin). A cell permeation peptide can also include a nuclear localization signal (NLS). For example, a cell permeation peptide can be a bipartite amphipathic peptide, such as MPG, which is derived from the fusion peptide domain of HIV-1 gp41 and the NLS of SV40 large T antigen (Simeoni et al., Nucl. Acids Res. 31:2717-2724, 2003).

### C. Carbohydrate Conjugates

[0628] In some embodiments of the compositions and methods of the invention, an iRNA further comprises a carbohydrate. The carbohydrate conjugated iRNA is advantageous for the in vivo delivery of nucleic acids, as well as compositions suitable for in vivo therapeutic use, as described herein. As used herein, “carbohydrate” refers to a compound which is either a carbohydrate per se made up of one or more monosaccharide units having at least 6 carbon atoms (which can be linear, branched or cyclic) with an oxygen, nitrogen or sulfur atom bonded to each carbon atom; or a compound having as a part thereof a carbohydrate moiety made up of one or more monosaccharide units each having at least six carbon atoms (which can be linear, branched or cyclic), with an oxygen, nitrogen or sulfur atom bonded to each carbon atom. Representative carbohydrates include the sugars (mono-, di-, tri-, and oligosaccharides containing from about 4, 5, 6, 7, 8, or 9 monosaccharide units), and polysaccharides such as starches, glycogen, cellulose and polysaccharide gums. Specific monosaccharides include C5 and above (e.g., C5, C6, C7, or C8) sugars; di- and trisaccharides include sugars having two or three monosaccharide units (e.g., C5, C6, C7, or C8).

[0629] In certain embodiments, a carbohydrate conjugate for use in the compositions and methods of the invention is a monosaccharide.

[0630] In certain embodiments, the monosaccharide is an N-acetylgalactosamine (GalNAc). GalNAc conjugates, which comprise one or more N-acetylgalactosamine (GalNAc) derivatives, are described, for example, in U.S. Pat. No. 8,106,022, the entire content of which is hereby incorporated herein by reference. In some embodiments, the GalNAc conjugate serves as a ligand that targets the iRNA to particular cells. In some embodiments, the GalNAc conjugate targets the iRNA to liver cells, e.g., by serving as a ligand for the asialoglycoprotein receptor of liver cells (e.g., hepatocytes).

[0631] In some embodiments, the carbohydrate conjugate comprises one or more GalNAc derivatives. The GalNAc derivatives may be attached via a linker, e.g., a bivalent or trivalent branched linker. In some embodiments the GalNAc conjugate is conjugated to the 3′ end of the sense strand. In some embodiments, the GalNAc conjugate is conjugated to the iRNA agent (e.g., to the 3′ end of the sense strand) via a linker, e.g., a linker as described herein. In some embodiments the GalNAc conjugate is conjugated to the 5′ end of the sense strand. In some embodiments, the GalNAc conjugate is conjugated to the iRNA agent (e.g., to the 5′ end of the sense strand) via a linker, e.g., a linker as described herein.

[0632] In certain embodiments of the invention, the GalNAc or GalNAc derivative is attached to an iRNA agent of the invention via a monovalent linker. In some embodiments, the GalNAc or GalNAc derivative is attached to an iRNA agent of the invention via a bivalent linker. In yet other embodiments of the invention, the GalNAc or GalNAc derivative is attached to an iRNA agent of the invention via a trivalent linker. In other embodiments of the invention, the GalNAc or GalNAc derivative is attached to an iRNA agent of the invention via a tetravalent linker.

[0633] In certain embodiments, the double stranded RNAi agents of the invention comprise one GalNAc or GalNAc derivative attached to the iRNA agent. In certain embodiments, the double stranded RNAi agents of the invention comprise a plurality (e.g., 2, 3, 4, 5, or 6) GalNAc or GalNAc derivatives, each independently attached to a plurality of nucleotides of the double stranded RNAi agent through a plurality of monovalent linkers.

[0634] In some embodiments, for example, when the two strands of an iRNA agent of the invention are part of one larger molecule connected by an uninterrupted chain of nucleotides between the 3′-end of one strand and the 5′-end of the respective other strand forming a hairpin loop comprising, a plurality of unpaired nucleotides, each unpaired nucleotide within the hairpin loop may independently comprise a GalNAc or GalNAc derivative attached via a monovalent linker. The hairpin loop may also be formed by an extended overhang in one strand of the duplex.

[0635] In some embodiments, for example, when the two strands of an iRNA agent of the invention are part of one larger molecule connected by an uninterrupted chain of nucleotides between the 3′-end of one strand and the 5′-end of the respective other strand forming a hairpin loop comprising, a plurality of unpaired nucleotides, each unpaired nucleotide within the hairpin loop may independently comprise a GalNAc or GalNAc derivative attached via a monovalent linker. The hairpin loop may also be formed by an extended overhang in one strand of the duplex.

[0636] In one embodiment, a carbohydrate conjugate for use in the compositions and methods of the invention is selected from the group consisting of:

[chemical structure]

[chemical structure]

[chemical structure]

[chemical structure]

[chemical structure]

wherein Y is O or S and n is 3-6 (Formula XXIV);

[chemical structure]

wherein Y is O or S and n is 3-6 (Formula XXV);

[chemical structure]

wherein X is O or S (Formula XXVII);

[chemical structure]

[chemical structure]

[chemical structure]

[0637] In another embodiment, a carbohydrate conjugate for use in the compositions and methods of the invention is a monosaccharide. In one embodiment, the monosaccharide is an N-acetylgalactosamine, such as

[chemical structure]

[0638] In some embodiments, the RNAi agent is attached to the carbohydrate conjugate via a linker as shown in the following schematic, wherein X is O or S

[chemical structure]

[0639] In some embodiments, the RNAi agent is conjugated to L96 as defined in Table 1 and shown below:

[chemical structure]

[0640] Another representative carbohydrate conjugate for use in the embodiments described herein includes, but is not limited to,

[chemical structure]

when one of X or Y is an oligonucleotide, the other is a hydrogen.

[0641] In some embodiments, a suitable ligand is a ligand disclosed in WO 2019/055633, the entire contents of which are incorporated herein by reference. In one embodiment the ligand comprises the structure below:

[chemical structure]

[0642] In certain embodiments of the invention, the GalNAc or GalNAc derivative is attached to an iRNA agent of the invention via a monovalent linker. In some embodiments, the GalNAc or GalNAc derivative is attached to an iRNA agent of the invention via a bivalent linker. In yet other embodiments of the invention, the GalNAc or GalNAc derivative is attached to an iRNA agent of the invention via a trivalent linker.

[0643] In one embodiment, the double stranded RNAi agents of the invention comprise one or more GalNAc or GalNAc derivative attached to the iRNA agent. The GalNAc may be attached to any nucleotide via a linker on the sense strand or antisense strand. The GalNac may be attached to the 5′-end of the sense strand, the 3′ end of the sense strand, the 5′-end of the antisense strand, or the 3′-end of the antisense strand. In one embodiment, the GalNAc is attached to the 3′ end of the sense strand, e.g., via a trivalent linker.

[0644] In other embodiments, the double stranded RNAi agents of the invention comprise a plurality (e.g., 2, 3, 4, 5, or 6) GalNAc or GalNAc derivatives, each independently attached to a plurality of nucleotides of the double stranded RNAi agent through a plurality of linkers, e.g., monovalent linkers.

[0645] In some embodiments, for example, when the two strands of an iRNA agent of the invention is part of one larger molecule connected by an uninterrupted chain of nucleotides between the 3′-end of one strand and the 5′-end of the respective other strand forming a hairpin loop comprising, a plurality of unpaired nucleotides, each unpaired nucleotide within the hairpin loop may independently comprise a GalNAc or GalNAc derivative attached via a monovalent linker.

[0646] In some embodiments, the carbohydrate conjugate further comprises one or more additional ligands as described above, such as, but not limited to, a PK modulator or a cell permeation peptide.

[0647] Additional carbohydrate conjugates and linkers suitable for use in the present invention include those described in PCT Publication Nos. WO 2014/179620 and WO 2014/179627, the entire contents of each of which are incorporated herein by reference.

### D. Linkers

[0648] In some embodiments, the conjugate or ligand described herein can be attached to an iRNA oligonucleotide with various linkers that can be cleavable or non-cleavable.

[0649] The term “linker” or “linking group” means an organic moiety that connects two parts of a compound, e.g., covalently attaches two parts of a compound. Linkers typically comprise a direct bond or an atom such as oxygen or sulfur, a unit such as NR8, C(O), C(O)NH, SO, SO₂, SO₂NH or a chain of atoms, such as, but not limited to, substituted or unsubstituted alkyl, substituted or unsubstituted alkenyl, substituted or unsubstituted alkynyl, arylalkyl, arylalkenyl, arylalkynyl, heteroarylalkyl, heteroarylalkenyl, heteroarylalkynyl, heterocyclylalkyl, heterocyclylalkenyl, heterocyclylalkynyl, aryl, heteroaryl, heterocyclyl, cycloalkyl, cycloalkenyl, alkylarylalkyl, alkylarylalkenyl, alkylarylalkynyl, alkenylarylalkyl, alkenylarylalkenyl, alkenylarylalkynyl, alkynylarylalkyl, alkynylarylalkenyl, alkynylarylalkynyl, alkylheteroarylalkyl, alkylheteroarylalkenyl, alkylheteroarylalkynyl, alkenylheteroarylalkyl, alkenylheteroarylalkenyl, alkenylheteroarylalkynyl, alkynylheteroarylalkyl, alkynylheteroarylalkenyl, alkynylheteroarylalkynyl, alkylheterocyclylalkyl, alkylheterocyclylalkenyl, alkylhererocyclylalkynyl, alkenylheterocyclylalkyl, alkenylheterocyclylalkenyl, alkenylheterocyclylalkynyl, alkynylheterocyclylalkyl, alkynylheterocyclylalkenyl, alkynylheterocyclylalkynyl, alkylaryl, alkenylaryl, alkynylaryl, alkylheteroaryl, alkenylheteroaryl, alkynylhereroaryl, which one or more methylenes can be interrupted or terminated by 0, S, S(O), SO₂, N(R8), C(O), substituted or unsubstituted aryl, substituted or unsubstituted heteroaryl, or substituted or unsubstituted heterocyclic; where R8 is hydrogen, acyl, aliphatic, or substituted aliphatic. In one embodiment, the linker is about 1-24 atoms, 2-24, 3-24, 4-24, 5-24, 6-24, 6-18, 7-18, 8-18, 7-17, 8-17, 6-16, 7-17, or 8-16 atoms.

[0650] A cleavable linking group is one which is sufficiently stable outside the cell, but which upon entry into a target cell is cleaved to release the two parts the linker is holding together. In a preferred embodiment, the cleavable linking group is cleaved at least about 10 times, 20, times, 30 times, 40 times, 50 times, 60 times, 70 times, 80 times, 90 times, or more, or at least 100 times faster in a target cell or under a first reference condition (which can, e.g., be selected to mimic or represent intracellular conditions) than in the blood of a subject, or under a second reference condition (which can, e.g., be selected to mimic or represent conditions found in the blood or serum).

[0651] Cleavable linking groups are susceptible to cleavage agents, e.g., pH, redox potential, or the presence of degradative molecules. Generally, cleavage agents are more prevalent or found at higher levels or activities inside cells than in serum or blood. Examples of such degradative agents include: redox agents which are selected for particular substrates or which have no substrate specificity, including, e.g., oxidative or reductive enzymes or reductive agents such as mercaptans, present in cells, that can degrade a redox cleavable linking group by reduction; esterases; endosomes or agents that can create an acidic environment, e.g., those that result in a pH of five or lower; enzymes that can hydrolyze or degrade an acid cleavable linking group by acting as a general acid, peptidases (which can be substrate specific), and phosphatases.

[0652] A cleavable linkage group, such as a disulfide bond can be susceptible to pH. The pH of human serum is 7.4, while the average intracellular pH is slightly lower, ranging from about 7.1-7.3. Endosomes have a more acidic pH, in the range of 5.5-6.0, and lysosomes have an even more acidic pH at around 5.0. Some linkers will have a cleavable linking group that is cleaved at a preferred pH, thereby releasing a cationic lipid from the ligand inside the cell, or into the desired compartment of the cell.

[0653] A linker can include a cleavable linking group that is cleavable by a particular enzyme. The type of cleavable linking group incorporated into a linker can depend on the cell to be targeted. For example, a liver-targeting ligand can be linked to a cationic lipid through a linker that includes an ester group. Liver cells are rich in esterases, and therefore the linker will be cleaved more efficiently in liver cells than in cell types that are not esterase-rich. Other cell-types rich in esterases include cells of the lung, renal cortex, and testis.

[0654] Linkers that contain peptide bonds can be used when targeting cell types rich in peptidases, such as liver cells and synoviocytes.

[0655] In general, the suitability of a candidate cleavable linking group can be evaluated by testing the ability of a degradative agent (or condition) to cleave the candidate linking group. It will also be desirable to also test the candidate cleavable linking group for the ability to resist cleavage in the blood or when in contact with other non-target tissue. Thus, one can determine the relative susceptibility to cleavage between a first and a second condition, where the first is selected to be indicative of cleavage in a target cell and the second is selected to be indicative of cleavage in other tissues or biological fluids, e.g., blood or serum. The evaluations can be carried out in cell free systems, in cells, in cell culture, in organ or tissue culture, or in whole animals. It can be useful to make initial evaluations in cell-free or culture conditions and to confirm by further evaluations in whole animals. In preferred embodiments, useful candidate compounds are cleaved at least about 2, 4, 10, 20, 30, 40, 50, 60, 70, 80, 90, or 100 times faster in the cell (or under in vitro conditions selected to mimic intracellular conditions) as compared to blood or serum (or under in vitro conditions selected to mimic extracellular conditions).

i. Redox Cleavable Linking Groups

[0656] In certain embodiments, a cleavable linking group is a redox cleavable linking group that is cleaved upon reduction or oxidation. An example of reductively cleavable linking group is a disulphide linking group (—S—S—). To determine if a candidate cleavable linking group is a suitable “reductively cleavable linking group,” or for example is suitable for use with a particular iRNA moiety and particular targeting agent one can look to methods described herein. For example, a candidate can be evaluated by incubation with dithiothreitol (DTT), or other reducing agent using reagents know in the art, which mimic the rate of cleavage which would be observed in a cell, e.g., a target cell. The candidates can also be evaluated under conditions which are selected to mimic blood or serum conditions. In one, candidate compounds are cleaved by at most about 10% in the blood. In other embodiments, useful candidate compounds are degraded at least about 2, 4, 10, 20, 30, 40, 50, 60, 70, 80, 90, or about 100 times faster in the cell (or under in vitro conditions selected to mimic intracellular conditions) as compared to blood (or under in vitro conditions selected to mimic extracellular conditions). The rate of cleavage of candidate compounds can be determined using standard enzyme kinetics assays under conditions chosen to mimic intracellular media and compared to conditions chosen to mimic extracellular media.

ii. Phosphate-Based Cleavable Linking Groups

[0657] In other embodiments, a cleavable linker comprises a phosphate-based cleavable linking group. A phosphate-based cleavable linking group is cleaved by agents that degrade or hydrolyze the phosphate group. An example of an agent that cleaves phosphate groups in cells are enzymes such as phosphatases in cells. Examples of phosphate-based linking groups are —O—P(O)(ORk)-O—, —O—P(S)(ORk)-O—, —O—P(S)(SRk)-O—, —S—P(O)(ORk)-O—, —O—P(O)(ORk)-S—, —S—P(O)(ORk)-S—, —O—P(S)(ORk)-S—, —S—P(S)(ORk)-O—, —O—P(O)(Rk)-O—, —O—P(S)(Rk)-O—, —S—P(O)(Rk)-O—, —S—P(S)(Rk)-O—, —S—P(O)(Rk)-S—, —O—P(S)(Rk)-S—. Preferred embodiments are —O—P(O)(OH)—O—, —O—P(S)(OH)—O—, —O—P(S)(SH)—O—, —S—P(O)(OH)—O—, —O—P(O)(OH)—S—, —S—P(O)(OH)—S—, —O—P(S)(OH)—S—, —S—P(S)(OH)—O—, —O—P(O)(H)—O—, —O—P(S)(H)—O—, —S—P(O)(H)—O, —S—P(S)(H)—O—, —S—P(O)(H)—S—, and —O—P(S)(H)—S—. A preferred embodiment is —O—P(O)(OH)—O—. These candidates can be evaluated using methods analogous to those described above.

iii. Acid Cleavable Linking Groups

[0658] In other embodiments, a cleavable linker comprises an acid cleavable linking group. An acid cleavable linking group is a linking group that is cleaved under acidic conditions. In preferred embodiments acid cleavable linking groups are cleaved in an acidic environment with a pH of about 6.5 or lower (e.g., about 6.0, 5.5, 5.0, or lower), or by agents such as enzymes that can act as a general acid. In a cell, specific low pH organelles, such as endosomes and lysosomes can provide a cleaving environment for acid cleavable linking groups. Examples of acid cleavable linking groups include but are not limited to hydrazones, esters, and esters of amino acids. Acid cleavable groups can have the general formula —C═NN—, C(O)O, or —OC(O). A preferred embodiment is when the carbon attached to the oxygen of the ester (the alkoxy group) is an aryl group, substituted alkyl group, or tertiary alkyl group such as dimethyl pentyl or t-butyl. These candidates can be evaluated using methods analogous to those described above.

iv. Ester-Based Linking Groups

[0659] In other embodiments, a cleavable linker comprises an ester-based cleavable linking group. An ester-based cleavable linking group is cleaved by enzymes such as esterases and amidases in cells. Examples of ester-based cleavable linking groups include, but are not limited to, esters of alkylene, alkenylene and alkynylene groups. Ester cleavable linking groups have the general formula —C(O)O—, or —OC(O)—. These candidates can be evaluated using methods analogous to those described above.

v. Peptide-Based Cleaving Groups

[0660] In yet other embodiments, a cleavable linker comprises a peptide-based cleavable linking group. A peptide-based cleavable linking group is cleaved by enzymes such as peptidases and proteases in cells. Peptide-based cleavable linking groups are peptide bonds formed between amino acids to yield oligopeptides (e.g., dipeptides, tripeptides etc.) and polypeptides. Peptide-based cleavable groups do not include the amide group (—C(O)NH—). The amide group can be formed between any alkylene, alkenylene or alkynelene. A peptide bond is a special type of amide bond formed between amino acids to yield peptides and proteins. The peptide based cleavage group is generally limited to the peptide bond (i.e., the amide bond) formed between amino acids yielding peptides and proteins and does not include the entire amide functional group. Peptide-based cleavable linking groups have the general formula —NHCHRAC(O)NHCHRBC(O)—, where RA and RB are the R groups of the two adjacent amino acids. These candidates can be evaluated using methods analogous to those described above.

[0661] In some embodiments, an iRNA of the invention is conjugated to a carbohydrate through a linker. Non-limiting examples of iRNA carbohydrate conjugates with linkers of the compositions and methods of the invention include but are not limited to

[chemical structure]

[chemical structure]

[chemical structure]

when one of X or Y is an oligonucleotide, the other is a hydrogen.

[0662] In certain embodiments of the compositions and methods of the invention, a ligand is one or more “GalNAc” (N-acetylgalactosamine) derivatives attached through a bivalent or trivalent branched linker.

[0663] In one embodiment, a dsRNA of the invention is conjugated to a bivalent or trivalent branched linker selected from the group of structures shown in any of formula (XLV)-(XLVI):

[chemical structure]

[0664] wherein:
[0665] q2A, q2B, q3A, q3B, q4A, q4B, q5A, q5B and q5C represent independently for each occurrence 0-20 and wherein the repeating unit can be the same or different;
[0666] P^{2A}, P^{2B}, P^{3A}, P^{3B}, P^{4A}, P^{4B}, P^{5A}, P^{5B}, P^{5C}, T^{2A}, T^{2B}, T^{3A}, T^{3B}, T^{4A}, T^{4B}, T^{4A}, T^{5B}, T^{5C} are each independently for each occurrence absent, CO, NH, O, S, OC(O), NHC(O), CH₂, CH₂NH or CH₂O;
[0667] Q^{2A}A, Q^{2B}, Q^{3A}, Q^{3B}, Q^{4A}, Q^{4B}, Q^{5A}A, Q^{5B}, Q^{5C} are independently for each occurrence absent, alkylene, substituted alkylene wherein one or more methylenes can be interrupted or terminated by one or more of O, S, S(O), SO₂, N(R^{N}), C(R′)═C(R″), C≡C or C(O);
[0668] R^{2A}, R^{2B}, R^{3A}, R^{3B}, R^{4A}, R^{4B}, R^{5A}, R^{5B}, R^{5C} are each independently for each occurrence absent NH, O, S, CH₂, C(O)O, C(O)NH, NHCH(R^{a})C(O), —C(O)—CH(R^{a})—NH—, CO, CH═N—O,

[chemical structure]

or heterocyclyl; L^{2A}, L^{2B}, L^{3A}, L^{3B}, L^{4A}, L^{4B}, L^{5A}, L^{5B} and L^{5C} represent the ligand; i.e. each independently for each occurrence a monosaccharide (such as GalNAc), disaccharide, trisaccharide, tetrasaccharide, oligosaccharide, or polysaccharide; and R^{a} is H or amino acid side chain. Trivalent conjugating GalNAc derivatives are particularly useful for use with RNAi agents for inhibiting the expression of a target gene, such as those of formula (XLIX):

[chemical structure]

wherein L^{5A}, L^{5B} and L^{5C} represent a monosaccharide, such as GalNAc derivative.

[0669] Examples of suitable bivalent and trivalent branched linker groups conjugating GalNAc derivatives include, but are not limited to, the structures recited above as formulas II, VII, XI, X, and XIII.

[0670] Representative U.S. Patents that teach the preparation of RNA conjugates include, but are not limited to, U.S. Pat. Nos. 4,828,979; 4,948,882; 5,218,105; 5,525,465; 5,541,313; 5,545,730; 5,552,538; 5,578,717, 5,580,731; 5,591,584; 5,109,124; 5,118,802; 5,138,045; 5,414,077; 5,486,603; 5,512,439; 5,578,718; 5,608,046; 4,587,044; 4,605,735; 4,667,025; 4,762,779; 4,789,737; 4,824,941; 4,835,263; 4,876,335; 4,904,582; 4,958,013; 5,082,830; 5,112,963; 5,214,136; 5,082,830; 5,112,963; 5,214,136; 5,245,022; 5,254,469; 5,258,506; 5,262,536; 5,272,250; 5,292,873; 5,317,098; 5,371,241, 5,391,723; 5,416,203, 5,451,463; 5,510,475; 5,512,667; 5,514,785; 5,565,552; 5,567,810; 5,574,142; 5,585,481; 5,587,371; 5,595,726; 5,597,696; 5,599,923; 5,599,928; 5,688,941; 6,294,664; 6,320,017; 6,576,752; 6,783,931; 6,900,297; 7,037,646; and 8,106,022, the entire contents of each of which are hereby incorporated herein by reference.

[0671] It is not necessary for all positions in a given compound to be uniformly modified, and in fact more than one of the aforementioned modifications can be incorporated in a single compound or even at a single nucleoside within an iRNA. The present invention also includes iRNA compounds that are chimeric compounds.

[0672] “Chimeric” iRNA compounds or “chimeras,” in the context of this invention, are iRNA compounds, preferably dsRNAi agents, that contain two or more chemically distinct regions, each made up of at least one monomer unit, i.e., a nucleotide in the case of a dsRNA compound. These iRNAs typically contain at least one region wherein the RNA is modified so as to confer upon the iRNA increased resistance to nuclease degradation, increased cellular uptake, or increased binding affinity for the target nucleic acid. An additional region of the iRNA can serve as a substrate for enzymes capable of cleaving RNA:DNA or RNA:RNA hybrids. By way of example, RNase H is a cellular endonuclease which cleaves the RNA strand of an RNA:DNA duplex. Activation of RNase H, therefore, results in cleavage of the RNA target, thereby greatly enhancing the efficiency of iRNA inhibition of gene expression. Consequently, comparable results can often be obtained with shorter iRNAs when chimeric dsRNAs are used, compared to phosphorothioate deoxy dsRNAs hybridizing to the same target region. Cleavage of the RNA target can be routinely detected by gel electrophoresis and, if necessary, associated nucleic acid hybridization techniques known in the art.

[0673] In certain instances, the RNA of an iRNA can be modified by a non-ligand group. A number of non-ligand molecules have been conjugated to iRNAs in order to enhance the activity, cellular distribution or cellular uptake of the iRNA, and procedures for performing such conjugations are available in the scientific literature. Such non-ligand moieties have included lipid moieties, such as cholesterol (Kubo, T. et al., Biochem. Biophys. Res. Comm., 2007, 365(1):54-61; Letsinger et al., Proc. Natl. Acad. Sci. USA, 1989, 86:6553), cholic acid (Manoharan et al., Bioorg. Med. Chem. Lett., 1994, 4:1053), a thioether, e.g., hexyl-S-tritylthiol (Manoharan et al., Ann. N.Y. Acad. Sci., 1992, 660:306; Manoharan et al., Bioorg. Med. Chem. Let., 1993, 3:2765), a thiocholesterol (Oberhauser et al., Nucl. Acids Res., 1992, 20:533), an aliphatic chain, e.g., dodecandiol or undecyl residues (Saison-Behmoaras et al., EMBO J., 1991, 10:111; Kabanov et al., FEBS Lett., 1990, 259:327; Svinarchuk et al., Biochimie, 1993, 75:49), a phospholipid, e.g., di-hexadecyl-rac-glycerol or triethylammonium 1,2-di-O-hexadecyl-rac-glycero-3-H-phosphonate (Manoharan et al., Tetrahedron Lett., 1995, 36:3651; Shea et al., Nucl. Acids Res., 1990, 18:3777), a polyamine or a polyethylene glycol chain (Manoharan et al., Nucleosides & Nucleotides, 1995, 14:969), or adamantane acetic acid (Manoharan et al., Tetrahedron Lett., 1995, 36:3651), a palmityl moiety (Mishra et al., Biochim. Biophys. Acta, 1995, 1264:229), or an octadecylamine or hexylamino-carbonyl-oxycholesterol moiety (Crooke et al., J. Pharmacol. Exp. Ther., 1996, 277:923). Representative United States patents that teach the preparation of such RNA conjugates have been listed above. Typical conjugation protocols involve the synthesis of RNAs bearing an aminolinker at one or more positions of the sequence. The amino group is then reacted with the molecule being conjugated using appropriate coupling or activating reagents. The conjugation reaction can be performed either with the RNA still bound to the solid support or following cleavage of the RNA, in solution phase. Purification of the RNA conjugate by HPLC typically affords the pure conjugate.

### IV. Delivery of an iRNA of the Invention

[0674] The delivery of an iRNA of the invention to a cell e.g., a cell within a subject, such as a human subject (e.g., a subject in need thereof, such as a subject susceptible to or diagnosed with an apolipoprotein C3-associated disorder, e.g., hypertriglyceridemia) can be achieved in a number of different ways. For example, delivery may be performed by contacting a cell with an iRNA of the invention either in vitro or in vivo. In vivo delivery may also be performed directly by administering a composition comprising an iRNA, e.g., a dsRNA, to a subject. Alternatively, in vivo delivery may be performed indirectly by administering one or more vectors that encode and direct the expression of the iRNA. These alternatives are discussed further below.

[0675] In general, any method of delivering a nucleic acid molecule (in vitro or in vivo) can be adapted for use with an iRNA of the invention (see e.g., Akhtar S. and Julian R L. (1992) Trends Cell. Biol. 2(5):139-144 and WO94/02595, which are incorporated herein by reference in their entireties). For in vivo delivery, factors to consider in order to deliver an iRNA molecule include, for example, biological stability of the delivered molecule, prevention of non-specific effects, and accumulation of the delivered molecule in the target tissue. RNA interference has also shown success with local delivery to the CNS by direct injection (Dorn, G., et al. (2004) Nucleic Acids 32:e49; Tan, P H., et al (2005) Gene Ther. 12:59-66; Makimura, H., et al (2002) BMC Neurosci. 3:18; Shishkina, G T., et al (2004) Neuroscience 129:521-528; Thakker, E R., et al (2004) Proc. Natl. Acad. Sci. U.S.A. 101:17270-17275; Akaneya, Y., et al (2005) J. Neurophysiol. 93:594-602). Modification of the RNA or the pharmaceutical carrier can also permit targeting of the iRNA to the target tissue and avoid undesirable off-target effects. iRNA molecules can be modified by chemical conjugation to lipophilic groups such as cholesterol to enhance cellular uptake and prevent degradation. For example, an iRNA directed against ApoB conjugated to a lipophilic cholesterol moiety was injected systemically into mice and resulted in knockdown of apoB mRNA in both the liver and jejunum (Soutschek, J., et al (2004) Nature 432:173-178).

[0676] In an alternative embodiment, the iRNA can be delivered using drug delivery systems such as a nanoparticle, a dendrimer, a polymer, liposomes, or a cationic delivery system. Positively charged cationic delivery systems facilitate binding of an iRNA molecule (negatively charged) and also enhance interactions at the negatively charged cell membrane to permit efficient uptake of an iRNA by the cell. Cationic lipids, dendrimers, or polymers can either be bound to an iRNA, or induced to form a vesicle or micelle (see e.g., Kim S H, et al (2008) Journal of Controlled Release 129(2):107-116) that encases an iRNA. The formation of vesicles or micelles further prevents degradation of the iRNA when administered systemically. Methods for making and administering cationic-iRNA complexes are well within the abilities of one skilled in the art (see e.g., Sorensen, D R, et al (2003) J. Mol. Biol 327:761-766; Verma, U N, et al (2003) Clin. Cancer Res. 9:1291-1300; Arnold, A S et al (2007) J. Hypertens. 25:197-205, which are incorporated herein by reference in their entirety). Some non-limiting examples of drug delivery systems useful for systemic delivery of iRNAs include DOTAP (Sorensen, D R., et al (2003), supra; Verma, U N, et al (2003), supra), “solid nucleic acid lipid particles” (Zimmermann, T S, et al (2006) Nature 441:111-114), cardiolipin (Chien, P Y, et al (2005) Cancer Gene Ther. 12:321-328; Pal, A, et al (2005) Int J. Oncol. 26:1087-1091), polyethyleneimine (Bonnet M E, et al (2008) Pharm. Res. August 16 Epub ahead of print; Aigner, A. (2006) J. Biomed. Biotechnol. 71659), Arg-Gly-Asp (RGD) peptides (Liu, S. (2006) Mol. Pharm. 3:472-487), and polyamidoamines (Tomalia, D A, et al (2007) Biochem. Soc. Trans. 35:61-67; Yoo, H., et al (1999) Pharm. Res. 16:1799-1804). In some embodiments, an iRNA forms a complex with cyclodextrin for systemic administration. Methods for administration and pharmaceutical compositions of iRNAs and cyclodextrins can be found in U.S. Pat. No. 7,427,605, which is herein incorporated by reference in its entirety.

A. Vector encoded iRNAs of the Invention

[0677] iRNA targeting the apolipoprotein C3 gene can be expressed from transcription units inserted into DNA or RNA vectors (see, e.g., Couture, A, et al., TIG. (1996), 12:5-10; Skillern, A, et al., International PCT Publication No. WO 00/22113, Conrad, International PCT Publication No. WO 00/22114, and Conrad, U.S. Pat. No. 6,054,299). Expression can be transient (on the order of hours to weeks) or sustained (weeks to months or longer), depending upon the specific construct used and the target tissue or cell type. These transgenes can be introduced as a linear construct, a circular plasmid, or a viral vector, which can be an integrating or non-integrating vector. The transgene can also be constructed to permit it to be inherited as an extrachromosomal plasmid (Gassmann, et al., Proc. Natl. Acad. Sci. USA (1995) 92:1292).

[0678] Viral vector systems which can be utilized with the methods and compositions described herein include, but are not limited to, (a) adenovirus vectors; (b) retrovirus vectors, including but not limited to lentiviral vectors, moloney murine leukemia virus, etc.; (c) adeno-associated virus vectors; (d) herpes simplex virus vectors; (e) SV 40 vectors; (f) polyoma virus vectors; (g) papilloma virus vectors; (h) picornavirus vectors; (i) pox virus vectors such as an orthopox, e.g., vaccinia virus vectors or avipox, e.g. canary pox or fowl pox; and (j) a helper-dependent or gutless adenovirus. Replication-defective viruses can also be advantageous. Different vectors will or will not become incorporated into the cells' genome. The constructs can include viral sequences for transfection, if desired. Alternatively, the construct can be incorporated into vectors capable of episomal replication, e.g. EPV and EBV vectors. Constructs for the recombinant expression of an iRNA will generally require regulatory elements, e.g., promoters, enhancers, etc., to ensure the expression of the iRNA in target cells. Other aspects to consider for vectors and constructs are known in the art.

### V. Pharmaceutical Compositions of the Invention

[0679] The present invention also includes pharmaceutical compositions and formulations which include the iRNAs of the invention. In one embodiment, provided herein are pharmaceutical compositions containing an iRNA, as described herein, and a pharmaceutically acceptable carrier. The pharmaceutical compositions containing the iRNA are useful for preventing or treating an apolipoprotein C3-associated disorder, e.g., hypertriglyceridemia. Such pharmaceutical compositions are formulated based on the mode of delivery. One example is compositions that are formulated for systemic administration via parenteral delivery, e.g., by subcutaneous (SC), intramuscular (IM), or intravenous (IV) delivery. The pharmaceutical compositions of the invention may be administered in dosages sufficient to inhibit expression of an apolipoprotein C3 gene.

[0680] In some embodiments, the pharmaceutical compositions of the invention are sterile. In another embodiment, the pharmaceutical compositions of the invention are pyrogen free.

[0681] The pharmaceutical compositions of the invention may be administered in dosages sufficient to inhibit expression of an apolipoprotein C3 gene. In general, a suitable dose of an iRNA of the invention will be in the range of about 0.001 to about 200.0 milligrams per kilogram body weight of the recipient per day, generally in the range of about 1 to 50 mg per kilogram body weight per day. Typically, a suitable dose of an iRNA of the invention will be in the range of about 0.1 mg/kg to about 5.0 mg/kg, preferably about 0.3 mg/kg and about 3.0 mg/kg. A repeat-dose regimen may include administration of a therapeutic amount of iRNA on a regular basis, such as every month, once every 3-6 months, or once a year. In certain embodiments, the iRNA is administered about once per month to about once per six months.

[0682] After an initial treatment regimen, the treatments can be administered on a less frequent basis. Duration of treatment can be determined based on the severity of disease.

[0683] In other embodiments, a single dose of the pharmaceutical compositions can be long lasting, such that doses are administered at not more than 1, 2, 3, or 4 month intervals. In some embodiments of the invention, a single dose of the pharmaceutical compositions of the invention is administered about once per month. In other embodiments of the invention, a single dose of the pharmaceutical compositions of the invention is administered quarterly (i.e., about every three months). In other embodiments of the invention, a single dose of the pharmaceutical compositions of the invention is administered twice per year (i.e., about once every six months).

[0684] The skilled artisan will appreciate that certain factors can influence the dosage and timing required to effectively treat a subject, including but not limited to mutations present in the subject, previous treatments, the general health or age of the subject, and other diseases present. Moreover, treatment of a subject with a prophylactically or therapeutically effective amount, as appropriate, of a composition can include a single treatment or a series of treatments.

[0685] The iRNA can be delivered in a manner to target a particular tissue (e.g., hepatocytes).

[0686] Pharmaceutical compositions of the present invention include, but are not limited to, solutions, emulsions, and liposome-containing formulations. These compositions can be generated from a variety of components that include, but are not limited to, preformed liquids, self-emulsifying solids, and self-emulsifying semisolids. Formulations include those that target the liver.

[0687] The pharmaceutical formulations of the present invention, which can conveniently be presented in unit dosage form, can be prepared according to conventional techniques well known in the pharmaceutical industry. Such techniques include the step of bringing into association the active ingredients with the pharmaceutical carrier(s) or excipient(s). In general, the formulations are prepared by uniformly and intimately bringing into association the active ingredients with liquid carriers.

### A. Additional Formulations

i. Emulsions

[0688] The compositions of the present invention can be prepared and formulated as emulsions. Emulsions are typically heterogeneous systems of one liquid dispersed in another in the form of droplets usually exceeding 0.1 μm in diameter (see e.g., Ansel's Pharmaceutical Dosage Forms and Drug Delivery Systems, Allen, LV., Popovich NG., and Ansel HC., 2004, Lippincott Williams & Wilkins (8th ed.), New York, NY; Idson, in Pharmaceutical Dosage Forms, Lieberman, Rieger and Banker (Eds.), 1988, Marcel Dekker, Inc., New York, N.Y., volume 1, p. 199; Rosoff, in Pharmaceutical Dosage Forms, Lieberman, Rieger and Banker (Eds.), 1988, Marcel Dekker, Inc., New York, N.Y., Volume 1, p. 245; Block in Pharmaceutical Dosage Forms, Lieberman, Rieger and Banker (Eds.), 1988, Marcel Dekker, Inc., New York, N.Y., volume 2, p. 335; Higuchi et al., in Remington's Pharmaceutical Sciences, Mack Publishing Co., Easton, Pa., 1985, p. 301). Emulsions are often biphasic systems comprising two immiscible liquid phases intimately mixed and dispersed with each other. In general, emulsions can be of either the water-in-oil (w/o) or the oil-in-water (o/w) variety. When an aqueous phase is finely divided into and dispersed as minute droplets into a bulk oily phase, the resulting composition is called a water-in-oil (w/o) emulsion. Alternatively, when an oily phase is finely divided into and dispersed as minute droplets into a bulk aqueous phase, the resulting composition is called an oil-in-water (o/w) emulsion. Emulsions can contain additional components in addition to the dispersed phases, and the active drug which can be present as a solution either in the aqueous phase, oily phase or itself as a separate phase. Pharmaceutical excipients such as emulsifiers, stabilizers, dyes, and anti-oxidants can also be present in emulsions as needed. Pharmaceutical emulsions can also be multiple emulsions that are comprised of more than two phases such as, for example, in the case of oil-in-water-in-oil (o/w/o) and water-in-oil-in-water (w/o/w) emulsions. Such complex formulations often provide certain advantages that simple binary emulsions do not. Multiple emulsions in which individual oil droplets of an o/w emulsion enclose small water droplets constitute a w/o/w emulsion. Likewise a system of oil droplets enclosed in globules of water stabilized in an oily continuous phase provides an o/w/o emulsion.

[0689] Emulsions are characterized by little or no thermodynamic stability. Often, the dispersed or discontinuous phase of the emulsion is well dispersed into the external or continuous phase and maintained in this form through the means of emulsifiers or the viscosity of the formulation. Other means of stabilizing emulsions entail the use of emulsifiers that can be incorporated into either phase of the emulsion. Emulsifiers can broadly be classified into four categories: synthetic surfactants, naturally occurring emulsifiers, absorption bases, and finely dispersed solids (see e.g., Ansel's Pharmaceutical Dosage Forms and Drug Delivery Systems, Allen, LV., Popovich NG., and Ansel HC., 2004, Lippincott Williams & Wilkins (8th ed.), New York, NY; Idson, in Pharmaceutical Dosage Forms, Lieberman, Rieger and Banker (Eds.), 1988, Marcel Dekker, Inc., New York, N.Y., volume 1, p. 199).

[0690] Synthetic surfactants, also known as surface active agents, have found wide applicability in the formulation of emulsions and have been reviewed in the literature (see e.g., Ansel's Pharmaceutical Dosage Forms and Drug Delivery Systems, Allen, LV., Popovich NG., and Ansel HC., 2004, Lippincott Williams & Wilkins (8th ed.), New York, NY; Rieger, in Pharmaceutical Dosage Forms, Lieberman, Rieger and Banker (Eds.), 1988, Marcel Dekker, Inc., New York, N.Y., volume 1, p. 285; Idson, in Pharmaceutical Dosage Forms, Lieberman, Rieger and Banker (Eds.), Marcel Dekker, Inc., New York, N.Y., 1988, volume 1, p. 199). Surfactants are typically amphiphilic and comprise a hydrophilic and a hydrophobic portion. The ratio of the hydrophilic to the hydrophobic nature of the surfactant has been termed the hydrophile/lipophile balance (HLB) and is a valuable tool in categorizing and selecting surfactants in the preparation of formulations. Surfactants can be classified into different classes based on the nature of the hydrophilic group: nonionic, anionic, cationic, and amphoteric (see e.g., Ansel's Pharmaceutical Dosage Forms and Drug Delivery Systems, Allen, LV., Popovich NG., and Ansel HC., 2004, Lippincott Williams & Wilkins (8th ed.), New York, NY Rieger, in Pharmaceutical Dosage Forms, Lieberman, Rieger and Banker (Eds.), 1988, Marcel Dekker, Inc., New York, N.Y., volume 1, p. 285).

[0691] A large variety of non-emulsifying materials are also included in emulsion formulations and contribute to the properties of emulsions. These include fats, oils, waxes, fatty acids, fatty alcohols, fatty esters, humectants, hydrophilic colloids, preservatives, and antioxidants (Block, in Pharmaceutical Dosage Forms, Lieberman, Rieger and Banker (Eds.), 1988, Marcel Dekker, Inc., New York, N.Y., volume 1, p. 335; Idson, in Pharmaceutical Dosage Forms, Lieberman, Rieger and Banker (Eds.), 1988, Marcel Dekker, Inc., New York, N.Y., volume 1, p. 199).

[0692] The application of emulsion formulations via dermatological, oral, and parenteral routes, and methods for their manufacture have been reviewed in the literature (see e.g., Ansel's Pharmaceutical Dosage Forms and Drug Delivery Systems, Allen, LV., Popovich NG., and Ansel HC., 2004, Lippincott Williams & Wilkins (8th ed.), New York, NY; Idson, in Pharmaceutical Dosage Forms, Lieberman, Rieger and Banker (Eds.), 1988, Marcel Dekker, Inc., New York, N.Y., volume 1, p. 199).

ii. Microemulsions

[0693] In one embodiment of the present invention, the compositions of iRNAs and nucleic acids are formulated as microemulsions. A microemulsion can be defined as a system of water, oil, and amphiphile which is a single optically isotropic and thermodynamically stable liquid solution (see e.g., Ansel's Pharmaceutical Dosage Forms and Drug Delivery Systems, Allen, LV., Popovich NG., and Ansel HC., 2004, Lippincott Williams & Wilkins (8th ed.), New York, NY; Rosoff, in Pharmaceutical Dosage Forms, Lieberman, Rieger and Banker (Eds.), 1988, Marcel Dekker, Inc., New York, N.Y., volume 1, p. 245). Typically microemulsions are systems that are prepared by first dispersing an oil in an aqueous surfactant solution and then adding a sufficient amount of a fourth component, generally an intermediate chain-length alcohol to form a transparent system. Therefore, microemulsions have also been described as thermodynamically stable, isotropically clear dispersions of two immiscible liquids that are stabilized by interfacial films of surface-active molecules (Leung and Shah, in: Controlled Release of Drugs: Polymers and Aggregate Systems, Rosoff, M., Ed., 1989, VCH Publishers, New York, pages 185-215).

iii. Microparticles

[0694] An iRNA of the invention may be incorporated into a particle, e.g., a microparticle. Microparticles can be produced by spray-drying, but may also be produced by other methods including lyophilization, evaporation, fluid bed drying, vacuum drying, or a combination of these techniques.

iv. Penetration Enhancers

[0695] In one embodiment, the present invention employs various penetration enhancers to effect the efficient delivery of nucleic acids, particularly iRNAs, to the skin of animals. Most drugs are present in solution in both ionized and nonionized forms. However, usually only lipid soluble or lipophilic drugs readily cross cell membranes. It has been discovered that even non-lipophilic drugs can cross cell membranes if the membrane to be crossed is treated with a penetration enhancer. In addition to aiding the diffusion of non-lipophilic drugs across cell membranes, penetration enhancers also enhance the permeability of lipophilic drugs.

[0696] Penetration enhancers can be classified as belonging to one of five broad categories, i.e., surfactants, fatty acids, bile salts, chelating agents, and non-chelating non-surfactants (see e.g., Malmsten, M. Surfactants and polymers in drug delivery, Informa Health Care, New York, NY, 2002; Lee et al., Critical Reviews in Therapeutic Drug Carrier Systems, 1991, p. 92). Each of the above mentioned classes of penetration enhancers and their use in manufacture of pharmaceutical compositions and delivery of pharmaceutical agents are well known in the art.

v. Excipients

[0697] In contrast to a carrier compound, a “pharmaceutical carrier” or “excipient” is a pharmaceutically acceptable solvent, suspending agent, or any other pharmacologically inert vehicle for delivering one or more nucleic acids to an animal. The excipient can be liquid or solid and is selected, with the planned manner of administration in mind, so as to provide for the desired bulk, consistency, etc., when combined with a nucleic acid and the other components of a given pharmaceutical composition. Such agent are well known in the art.

vi. Other Components

[0698] The compositions of the present invention can additionally contain other adjunct components conventionally found in pharmaceutical compositions, at their art-established usage levels. Thus, for example, the compositions can contain additional, compatible, pharmaceutically-active materials such as, for example, antipruritics, astringents, local anesthetics or anti-inflammatory agents, or can contain additional materials useful in physically formulating various dosage forms of the compositions of the present invention, such as dyes, flavoring agents, preservatives, antioxidants, opacifiers, thickening agents and stabilizers. However, such materials, when added, should not unduly interfere with the biological activities of the components of the compositions of the present invention. The formulations can be sterilized and, if desired, mixed with auxiliary agents, e.g., lubricants, preservatives, stabilizers, wetting agents, emulsifiers, salts for influencing osmotic pressure, buffers, colorings, flavorings, or aromatic substances, and the like which do not deleteriously interact with the nucleic acid(s) of the formulation.

[0699] Aqueous suspensions can contain substances which increase the viscosity of the suspension including, for example, sodium carboxymethylcellulose, sorbitol, or dextran. The suspension can also contain stabilizers.

[0700] In some embodiments, pharmaceutical compositions featured in the invention include (a) one or more iRNA and (b) one or more agents which function by a non-iRNA mechanism and which are useful in treating an apolipoprotein C3-associated disorder, e.g., hypertriglyceridemia.

[0701] Toxicity and prophylactic efficacy of such compounds can be determined by standard pharmaceutical procedures in cell cultures or experimental animals, e.g., for determining the LD50 (the dose lethal to 50% of the population) and the ED50 (the dose prophylactically effective in 50% of the population). The dose ratio between toxic and therapeutic effects is the therapeutic index and it can be expressed as the ratio LD50/ED50. Compounds that exhibit high therapeutic indices are preferred.

[0702] The data obtained from cell culture assays and animal studies can be used in formulating a range of dosage for use in humans. The dosage of compositions featured herein in the invention lies generally within a range of circulating concentrations that include the ED50, preferably an ED80 or ED90, with little or no toxicity. The dosage can vary within this range depending upon the dosage form employed and the route of administration utilized. For any compound used in the methods featured in the invention, the prophylactically effective dose can be estimated initially from cell culture assays. A dose can be formulated in animal models to achieve a circulating plasma concentration range of the compound or, when appropriate, of the polypeptide product of a target sequence (e.g., achieving a decreased concentration of the polypeptide) that includes the IC50 (i.e., the concentration of the test compound which achieves a half-maximal inhibition of symptoms) or higher levels of inhibition as determined in cell culture. Such information can be used to more accurately determine useful doses in humans. Levels in plasma can be measured, for example, by high performance liquid chromatography.

[0703] In addition to their administration, as discussed above, the iRNAs featured in the invention can be administered in combination with other known agents used for the prevention or treatment of an apolipoprotein C3-associated disorder, e.g., hypertriglyceridemia. In any event, the administering physician can adjust the amount and timing of iRNA administration on the basis of results observed using standard measures of efficacy known in the art or described herein.

### VI. Methods For Inhibiting Apolipoprotein C3 Expression

[0704] The present invention also provides methods of inhibiting expression of an APOC3 gene in a cell. The methods include contacting a cell with an RNAi agent, e.g., double stranded RNA agent, in an amount effective to inhibit expression of APOC3 in the cell, thereby inhibiting expression of APOC3 in the cell.

[0705] Contacting of a cell with an iRNA, e.g., a double stranded RNA agent, may be done in vitro or in vivo. Contacting a cell in vivo with the iRNA includes contacting a cell or group of cells within a subject, e.g., a human subject, with the iRNA. Combinations of in vitro and in vivo methods of contacting a cell are also possible. Contacting a cell may be direct or indirect, as discussed above. Furthermore, contacting a cell may be accomplished via a targeting ligand, including any ligand described herein or known in the art. In preferred embodiments, the targeting ligand is a carbohydrate moiety, e.g., a GalNAc₃ ligand, or any other ligand that directs the RNAi agent to a site of interest.

[0706] The term “inhibiting,” as used herein, is used interchangeably with “reducing,” “silencing,” “downregulating”, “suppressing”, and other similar terms, and includes any level of inhibition.

[0707] The phrase “inhibiting expression of a apolipoprotein C3” is intended to refer to inhibition of expression of any apolipoprotein C3 gene (such as, e.g., a mouse apolipoprotein C3 gene, a rat apolipoprotein C3 gene, a monkey apolipoprotein C3 gene, or a human apolipoprotein C3 gene) as well as variants or mutants of an apolipoprotein C3 gene. Thus, the apolipoprotein C3 gene may be a wild-type apolipoprotein C3 gene, a mutant apolipoprotein C3 gene, or a transgenic apolipoprotein C3 gene in the context of a genetically manipulated cell, group of cells, or organism.

[0708] “Inhibiting expression of an apolipoprotein C3 gene” includes any level of inhibition of an apolipoprotein C3 gene, e.g., at least partial suppression of the expression of an apolipoprotein C3 gene. The expression of the apolipoprotein C3 gene may be assessed based on the level, or the change in the level, of any variable associated with apolipoprotein C3 gene expression, e.g., apolipoprotein C3 mRNA level or apolipoprotein C3 protein level. This level may be assessed in an individual cell or in a group of cells, including, for example, a sample derived from a subject. It is understood that apolipoprotein C3 is expressed predominantly in the liver, but also in the brain, gall bladder, heart, and kidney, and is present in circulation.

[0709] Inhibition may be assessed by a decrease in an absolute or relative level of one or more variables that are associated with apolipoprotein C3 expression compared with a control level. The control level may be any type of control level that is utilized in the art, e.g., a pre-dose baseline level, or a level determined from a similar subject, cell, or sample that is untreated or treated with a control (such as, e.g., buffer only control or inactive agent control).

[0710] In some embodiments of the methods of the invention, expression of an apolipoprotein C3 gene is inhibited by at least 50%, 55%, 60%, 65%, 70%, 75%, 80%, 85%, 90%, or 95%, or to below the level of detection of the assay. In preferred embodiments, expression of an apolipoprotein C3 gene is inhibited by at least 70%. It is further understood that inhibition of apolipoprotein C3 expression in certain tissues, e.g., in liver, without a significant inhibition of expression in other tissues, e.g., brain, may be desirable. In preferred embodiments, expression level is determined using the assay method provided in Example 2 with a 10 nM siRNA concentration in the appropriate species matched cell line.

[0711] In certain embodiments, inhibition of expression in vivo is determined by knockdown of the human gene in a rodent expressing the human gene, e.g., an AAV-infected mouse expressing the human target gene (i.e., apolipoprotein C3), e.g., when administered as a single dose, e.g., at 3 mg/kg at the nadir of RNA expression. Knockdown of expression of an endogenous gene in a model animal system can also be determined, e.g., after administration of a single dose at, e.g., 3 mg/kg at the nadir of RNA expression. Such systems are useful when the nucleic acid sequence of the human gene and the model animal gene are sufficiently close such that the human iRNA provides effective knockdown of the model animal gene. RNA expression in liver is determined using the PCR methods provided in Example 2.

[0712] Inhibition of the expression of an apolipoprotein C3 gene may be manifested by a reduction of the amount of mRNA expressed by a first cell or group of cells (such cells may be present, for example, in a sample derived from a subject) in which an apolipoprotein C3 gene is transcribed and which has or have been treated (e.g., by contacting the cell or cells with an iRNA of the invention, or by administering an iRNA of the invention to a subject in which the cells are or were present) such that the expression of an apolipoprotein C3 gene is inhibited, as compared to a second cell or group of cells substantially identical to the first cell or group of cells but which has not or have not been so treated (control cell(s) not treated with an iRNA or not treated with an iRNA targeted to the gene of interest). In preferred embodiments, the inhibition is assessed by the method provided in Example 2 using a 10 nM siRNA concentration in the species matched cell line and expressing the level of mRNA in treated cells as a percentage of the level of mRNA in control cells, using the following formula:

$$\frac{( mRNA in control cells ) - ( mRNA in treated cells )}{( mRNA in control cells )} 100 \%$$

[0713] In other embodiments, inhibition of the expression of an apolipoprotein C3 gene may be assessed in terms of a reduction of a parameter that is functionally linked to apolipoprotein C3 gene expression, e.g., apolipoprotein C3 protein level in blood or serum from a subject. Apolipoprotein C3 gene silencing may be determined in any cell expressing apolipoprotein C3, either endogenous or heterologous from an expression construct, and by any assay known in the art.

[0714] Inhibition of the expression of an apolipoprotein C3 protein may be manifested by a reduction in the level of the apolipoprotein C3 protein that is expressed by a cell or group of cells or in a subject sample (e.g., the level of protein in a blood sample derived from a subject). As explained above, for the assessment of mRNA suppression, the inhibition of protein expression levels in a treated cell or group of cells may similarly be expressed as a percentage of the level of protein in a control cell or group of cells, or the change in the level of protein in a subject sample, e.g., blood or serum derived therefrom.

[0715] A control cell, a group of cells, or subject sample that may be used to assess the inhibition of the expression of an apolipoprotein C3 gene includes a cell, group of cells, or subject sample that has not yet been contacted with an RNAi agent of the invention. For example, the control cell, group of cells, or subject sample may be derived from an individual subject (e.g., a human or animal subject) prior to treatment of the subject with an RNAi agent or an appropriately matched population control.

[0716] The level of apolipoprotein C3 mRNA that is expressed by a cell or group of cells may be determined using any method known in the art for assessing mRNA expression. In one embodiment, the level of expression of apolipoprotein C3 in a sample is determined by detecting a transcribed polynucleotide, or portion thereof, e.g., mRNA of the apolipoprotein C3 gene. RNA may be extracted from cells using RNA extraction techniques including, for example, using acid phenol/guanidine isothiocyanate extraction (RNAzol B; Biogenesis), RNeasy™ RNA preparation kits (Qiagen®) or PAXgene™ (PreAnalytix™, Switzerland). Typical assay formats utilizing ribonucleic acid hybridization include nuclear run-on assays, RT-PCR, RNase protection assays, northern blotting, in situ hybridization, and microarray analysis.

[0717] In some embodiments, the level of expression of apolipoprotein C3 is determined using a nucleic acid probe. The term “probe”, as used herein, refers to any molecule that is capable of selectively binding to a specific apolipoprotein C3. Probes can be synthesized by one of skill in the art, or derived from appropriate biological preparations. Probes may be specifically designed to be labeled. Examples of molecules that can be utilized as probes include, but are not limited to, RNA, DNA, proteins, antibodies, and organic molecules.

[0718] Isolated mRNA can be used in hybridization or amplification assays that include, but are not limited to, Southern or northern analyses, polymerase chain reaction (PCR) analyses and probe arrays. One method for the determination of mRNA levels involves contacting the isolated mRNA with a nucleic acid molecule (probe) that can hybridize to apolipoprotein C3 mRNA. In one embodiment, the mRNA is immobilized on a solid surface and contacted with a probe, for example by running the isolated mRNA on an agarose gel and transferring the mRNA from the gel to a membrane, such as nitrocellulose. In an alternative embodiment, the probe(s) are immobilized on a solid surface and the mRNA is contacted with the probe(s), for example, in an Affymetrix® gene chip array. A skilled artisan can readily adapt known mRNA detection methods for use in determining the level of apolipoprotein C3 mRNA.

[0719] An alternative method for determining the level of expression of apolipoprotein C3 in a sample involves the process of nucleic acid amplification or reverse transcriptase (to prepare cDNA) of for example mRNA in the sample, e.g., by RT-PCR (the experimental embodiment set forth in Mullis, 1987, U.S. Pat. No. 4,683,202), ligase chain reaction (Barany (1991) Proc. Natl. Acad. Sci. USA 88:189-193), self sustained sequence replication (Guatelli et al. (1990) Proc. Natl. Acad. Sci. USA 87:1874-1878), transcriptional amplification system (Kwoh et al. (1989) Proc. Natl. Acad. Sci. USA 86:1173-1177), Q-Beta Replicase (Lizardi et al. (1988) Bio/Technology 6:1197), rolling circle replication (Lizardi et al., U.S. Pat. No. 5,854,033) or any other nucleic acid amplification method, followed by the detection of the amplified molecules using techniques well known to those of skill in the art. These detection schemes are especially useful for the detection of nucleic acid molecules if such molecules are present in very low numbers. In particular aspects of the invention, the level of expression of APOC3 is determined by quantitative fluorogenic RT-PCR (i.e., the TaqMan™ System). In preferred embodiments, expression level is determined by the method provided in Example 2 using, e.g., a 10 nM siRNA concentration, in the species matched cell line.

[0720] The expression levels of apolipoprotein C3 mRNA may be monitored using a membrane blot (such as used in hybridization analysis such as northern, Southern, dot, and the like), or microwells, sample tubes, gels, beads or fibers (or any solid support comprising bound nucleic acids). See U.S. Pat. Nos. 5,770,722, 5,874,219, 5,744,305, 5,677,195 and 5,445,934, which are incorporated herein by reference. The determination of apolipoprotein C3 expression level may also comprise using nucleic acid probes in solution.

[0721] In preferred embodiments, the level of mRNA expression is assessed using branched DNA (bDNA) assays or real time PCR (qPCR). The use of these methods is described and exemplified in the Examples presented herein. In preferred embodiments, expression level is determined by the method provided in Example 2 using a 10 nM siRNA concentration in the species matched cell line.

[0722] The level of APOC3 protein expression may be determined using any method known in the art for the measurement of protein levels. Such methods include, for example, electrophoresis, capillary electrophoresis, high performance liquid chromatography (HPLC), thin layer chromatography (TLC), hyperdiffusion chromatography, fluid or gel precipitin reactions, absorption spectroscopy, a colorimetric assays, spectrophotometric assays, flow cytometry, immunodiffusion (single or double), immunoelectrophoresis, western blotting, radioimmunoassay (RIA), enzyme-linked immunosorbent assays (ELISAs), immunofluorescent assays, electrochemiluminescence assays, and the like.

[0723] In some embodiments, the efficacy of the methods of the invention are assessed by a decrease in C3 mRNA or protein level (e.g., in a liver biopsy).

[0724] In some embodiments of the methods of the invention, the iRNA is administered to a subject such that the iRNA is delivered to a specific site within the subject. The inhibition of expression of apolipoprotein C3 may be assessed using measurements of the level or change in the level of apolipoprotein C3 mRNA or apolipoprotein C3 protein in a sample derived from fluid or tissue from the specific site within the subject (e.g., liver or blood).

[0725] As used herein, the terms detecting or determining a level of an analyte are understood to mean performing the steps to determine if a material, e.g., protein, RNA, is present. As used herein, methods of detecting or determining include detection or determination of an analyte level that is below the level of detection for the method used.

### VII. Prophylactic and Treatment Methods of the Invention

[0726] The present invention also provides methods of using an iRNA of the invention or a composition containing an iRNA of the invention to inhibit expression of apolipoprotein C3, thereby preventing or treating an apolipoprotein C3-associated disorder, e.g., hypertriglyceridemia, non-alcoholic fatty liver disease, non-alcoholic steatohepatitis, polycystic ovary syndrome, kidney disease, obesity, type 2 diabetes mellitus (insulin resistance); hypertension; cardiovascular disorders, e.g., artherosclerosis; and pancreatitis, e.g., acute pancreatitis. In the methods of the invention the cell may be contacted with the siRNA in vitro or in vivo, i.e., the cell may be within a subject.

[0727] A cell suitable for treatment using the methods of the invention may be any cell that expresses an apolipoprotein C3 gene, e.g., a liver cell, a brain cell, a gall bladder cell, a heart cell, or a kidney cell, but preferably a liver cell. A cell suitable for use in the methods of the invention may be a mammalian cell, e.g., a primate cell (such as a human cell, including human cell in a chimeric non-human animal, or a non-human primate cell, e.g., a monkey cell or a chimpanzee cell), or a non-primate cell. In certain embodiments, the cell is a human cell, e.g., a human liver cell. In the methods of the invention, apolipoprotein C3 expression is inhibited in the cell by at least 50, 55, 60, 65, 70, 75, 80, 85, 90, or 95, or to a level below the level of detection of the assay.

[0728] The in vivo methods of the invention may include administering to a subject a composition containing an iRNA, where the iRNA includes a nucleotide sequence that is complementary to at least a part of an RNA transcript of the apolipoprotein C3 gene of the mammal to which the RNAi agent is to be administered. The composition can be administered by any means known in the art including, but not limited to oral, intraperitoneal, or parenteral routes, including intracranial (e.g., intraventricular, intraparenchymal, and intrathecal), intravenous, intramuscular, subcutaneous, transdermal, airway (aerosol), nasal, rectal, and topical (including buccal and sublingual) administration. In certain embodiments, the compositions are administered by intravenous infusion or injection. In certain embodiments, the compositions are administered by subcutaneous injection. In certain embodiments, the compositions are administered by intramuscular injection.

[0729] In one aspect, the present invention also provides methods for inhibiting the expression of an apolipoprotein C3 gene in a mammal. The methods include administering to the mammal a composition comprising a dsRNA that targets an apolipoprotein C3 gene in a cell of the mammal and maintaining the mammal for a time sufficient to obtain degradation of the mRNA transcript of the apolipoprotein C3 gene, thereby inhibiting expression of the apolipoprotein C3 gene in the cell. Reduction in gene expression can be assessed by any methods known in the art and by methods, e.g. qRT-PCR, described herein, e.g., in Example 2. Reduction in protein production can be assessed by any methods known it the art, e.g. ELISA. In certain embodiments, a puncture liver biopsy sample serves as the tissue material for monitoring the reduction in the apolipoprotein C3 gene or protein expression. In other embodiments, a blood sample serves as the subject sample for monitoring the reduction in the apolipoprotein C3 protein expression.

[0730] The present invention further provides methods of treatment in a subject in need thereof, e.g., a subject diagnosed with an apolipoprotein C3-associated disorder, such as, hypertriglyceridemia, non-alcoholic fatty liver disease, non-alcoholic steatohepatitis, polycystic ovary syndrome, kidney disease, obesity, type 2 diabetes mellitus (insulin resistance); hypertension; cardiovascular disorders, e.g., artherosclerosis; and pancreatitis, e.g., acute pancreatitis.

[0731] The present invention further provides methods of prophylaxis in a subject in need thereof. The treatment methods of the invention include administering an iRNA of the invention to a subject, e.g., a subject that would benefit from a reduction of apolipoprotein C3 expression, in a prophylactically effective amount of an iRNA targeting an apolipoprotein C3 gene or a pharmaceutical composition comprising an iRNA targeting an apolipoprotein C3 gene.

[0732] In one embodiment, an apolipoprotein C3-associated disease is selected from the group consisting of hypertriglyceridemia, non-alcoholic fatty liver disease, non-alcoholic steatohepatitis, polycystic ovary syndrome, kidney disease, obesity, type 2 diabetes mellitus (insulin resistance); hypertension; cardiovascular disorders, e.g., artherosclerosis; and pancreatitis, e.g., acute pancreatitis.

[0733] In one embodiment, an APOC3-associated disease is hypertriglyceridemia, or a high triglyceride levels. The levels of triglycerides in a serum of a subject, e.g., a human subject, that may be indicative of hypertriglyceridemia are described in Oh, R. C. et al., (2007) American Family Physician, 75(9):1366-1371. Specifically, hypertriglyceridemia may be associated with “borderline-high serum triglyceride levels” (i.e., 150 to 199 mg per dL or 1.70 to 2.25 mmol per L); “high serum triglyceride levels” (i.e., 200 to 499 mg per dL or 2.26 to 5.64 mmol per L); or “very high triglyceride levels” (i.e., 500 mg per dL or higher (or 5.65 mmol per L or higher)

[0734] In one embodiment, an APOC3-associated disease is primary hypertriglyceridemia. “Primary triglyceridaemia” results from environmental or genetic causes (e.g., a result of no obvious underlying medical cause). Exemplary diseases characterized as primary hypertriglyceridemias include, but are not limited to, familial chylomicronemia (hyperlipoproteinemia type I), primary mixed hyperlipidemia (type 5), familial hypertriglyceridemia (hyperlipoproteinemia type 4), familial combined hyperlipoproteinemia (type 2B) and familial dysbetalipoproteinemia (hyperlipoproteinemia type 3).

[0735] In another embodiment, an APOC3-associated disease is secondary hypertriglyceridemia. “Secondary triglyceridaemia” is caused by, or be associated with, other underlying disorders and conditions. Such disorders and/or conditions include, e.g., obesity, metabolic syndrome, diabetes, fatty liver, alcohol use, renal disease, pregnancy, nonalcoholic fatty liver disorder, hypothyroidism, paraproteinemias (such as hypergammaglobulinemia in macroglobulinemia, myeloma, lymphoma and lymphocytic leukemias), autoimmune disorders (such as systemic lupus erythematosis), intake of medications (such as antiretroviral drugs, including ritonavir and lopinavir, and antipsychotic medications, including clozapine and olanzapine), see G. Yuan et al., (2007) Canadian Medical Association Journal, 176(8):1113-1120.

[0736] Any disorder that may be a cause of hypertriglyceridemia (e.g., secondary hypertriglyceridemia) or that may be a consequence of hypertriglyceridemia (e.g., primary or secondary hypertriglyceridemia) is encompassed by the term “APOC3-associated disease”. Non-limiting examples of APOC3-associated diseases include metabolic disorders, e.g., non-alcoholic fatty liver disease, non-alcoholic steatohepatitis, polycystic ovary syndrome, kidney disease, obesity, type 2 diabetes mellitus (insulin resistance); hypertension; cardiovascular disorders, e.g., artherosclerosis; and pancreatitis, e.g., acute pancreatitis.

[0737] An iRNA of the invention may be administered as a “free iRNA.” A free iRNA is administered in the absence of a pharmaceutical composition. The naked iRNA may be in a suitable buffer solution. The buffer solution may comprise acetate, citrate, prolamine, carbonate, or phosphate, or any combination thereof. In one embodiment, the buffer solution is phosphate buffered saline (PBS). The pH and osmolarity of the buffer solution containing the iRNA can be adjusted such that it is suitable for administering to a subject.

[0738] Alternatively, an iRNA of the invention may be administered as a pharmaceutical composition, such as a dsRNA liposomal formulation.

[0739] Subjects that would benefit from an inhibition of APOC3 gene expression are subjects susceptible to or diagnosed with an APOC3-associated disorder, such as hypertriglyceridemia, non-alcoholic fatty liver disease, non-alcoholic steatohepatitis, polycystic ovary syndrome, kidney disease, obesity, type 2 diabetes mellitus (insulin resistance); hypertension; cardiovascular disorders, e.g., artherosclerosis; and pancreatitis, e.g., acute pancreatitis.

[0740] In an embodiment, the method includes administering a composition featured herein such that expression of the target apolipoprotein C3 gene is decreased, such as for about 1, 2, 3, 4, 5, 6, 1-6, 1-3, or 3-6 months per dose. In certain embodiments, the composition is administered once every 3-6 months.

[0741] Preferably, the iRNAs useful for the methods and compositions featured herein specifically target RNAs (primary or processed) of the target apolipoprotein C3 gene. Compositions and methods for inhibiting the expression of these genes using iRNAs can be prepared and performed as described herein.

[0742] Administration of the iRNA according to the methods of the invention may result prevention or treatment of an apolipoprotein C3-associated disorder, e.g., hypertriglyceridemia, non-alcoholic fatty liver disease, non-alcoholic steatohepatitis, polycystic ovary syndrome, kidney disease, obesity, type 2 diabetes mellitus (insulin resistance); hypertension; cardiovascular disorders, e.g., artherosclerosis; and pancreatitis, e.g., acute pancreatitis.

[0743] Subjects can be administered a therapeutic amount of iRNA, such as about 0.01 mg/kg to about 200 mg/kg.

[0744] The iRNA is preferably administered subcutaneously, i.e., by subcutaneous injection. One or more injections may be used to deliver the desired dose of iRNA to a subject. The injections may be repeated over a period of time.

[0745] The administration may be repeated on a regular basis. In certain embodiments, after an initial treatment regimen, the treatments can be administered on a less frequent basis. A repeat-dose regimen may include administration of a therapeutic amount of iRNA on a regular basis, such as once per month to once a year. In certain embodiments, the iRNA is administered about once per month to about once every three months, or about once every three months to about once every six months.

[0746] The invention further provides methods and uses of an iRNA agent or a pharmaceutical composition thereof for treating a subject that would benefit from reduction and/or inhibition of APOC3 gene expression, e.g., a subject having an APOC3-associated disease, in combination with other pharmaceuticals and/or other therapeutic methods, e.g., with known pharmaceuticals and/or known therapeutic methods, such as, for example, those which are currently employed for treating these disorders.

[0747] Accordingly, in some aspects of the invention, the methods which include either a single iRNA agent of the invention, further include administering to the subject one or more additional therapeutic agents.

[0748] The iRNA agent and an additional therapeutic agent and/or treatment may be administered at the same time and/or in the same combination, e.g., parenterally, or the additional therapeutic agent can be administered as part of a separate composition or at separate times and/or by another method known in the art or described herein.

[0749] Examples of additional therapeutic agents include those known to treat hypertriglyceridemia and other diseases that are caused by, associated with or are a consequence of hypertriglyceridemia. For example, an iRNA featured in the invention can be administered with, e.g., a PCSK9 inhibitor (e.g., an anti-PCSK9 monoclonal antibody, e.g., evolocumab (Repatha®) and alirocumab (Praluent®), a dsRNA agent targeting PCSK9 (e.g., Inclisran)), an HMG-CoA reductase inhibitor (e.g., a statin), a fibrate, a bile acid sequestrant, niacin, an antiplatelet agent, an angiotensin converting enzyme inhibitor, an angiotensin II receptor antagonist (e.g., losartan potassium, such as Merck & Co.'s Cozaar®), an acylCoA cholesterol acetyltransferase (ACAT) inhibitor, a cholesterol absorption inhibitor, a cholesterol ester transfer protein (CETP) inhibitor, a microsomal triglyceride transfer protein (MTTP) inhibitor, a cholesterol modulator, a bile acid modulator, a peroxisome proliferation activated receptor (PPAR) agonist, a gene-based therapy, a composite vascular protectant (e.g., AGI-1067, from Atherogenics), a glycoprotein IIb/IIIa inhibitor, aspirin or an aspirin-like compound, an IBAT inhibitor (e.g., S-8921, from Shionogi), a squalene synthase inhibitor, a monocyte chemoattractant protein (MCP)-I inhibitor, or fish oil. Exemplary HMG-CoA reductase inhibitors include atorvastatin (Pfizer's Lipitor®/Tahor/Sortis/Torvast/Cardyl), pravastatin (Bristol-Myers Squibb's Pravachol, Sankyo's Mevalotin/Sanaprav), simvastatin (Merck's Zocor®/Sinvacor, Boehringer Ingelheim's Denan, Banyu's Lipovas), lovastatin (Merck's Mevacor/Mevinacor, Bexal's Lovastatina, Cepa; Schwarz Pharma's Liposcler), fluvastatin (Novartis' Lescol®/Locol/Lochol, Fujisawa's Cranoc, Solvay's Digaril), cerivastatin (Bayer's Lipobay/GlaxoSmithKline's Baycol), rosuvastatin (AstraZeneca's Crestor®), and pitivastatin (itavastatin/risivastatin) (Nissan Chemical, Kowa Kogyo, Sankyo, and Novartis). Exemplary fibrates include, e.g., bezafibrate (e.g., Roche's Befizal®/Cedur®/Bezalip®, Kissei's Bezatol), clofibrate (e.g., Wyeth's Atromid-S®), fenofibrate (e.g., Fournier's Lipidil/Lipantil, Abbott's Tricor®, Takeda's Lipantil, generics), gemfibrozil (e.g., Pfizer's Lopid/Lipur) and ciprofibrate (Sanofi-Synthelabo's Modalim®). Exemplary bile acid sequestrants include, e.g., cholestyramine (Bristol-Myers Squibb's Questran® and Questran Light™), colestipol (e.g., Pharmacia's Colestid), and colesevelam (Genzyme/Sankyo's WelChol™). Exemplary niacin therapies include, e.g., immediate release formulations, such as Aventis' Nicobid, Upsher-Smith's Niacor, Aventis' Nicolar, and Sanwakagaku's Perycit. Niacin extended release formulations include, e.g., Kos Pharmaceuticals' Niaspan and Upsher-Smith's SIo-Niacin. Exemplary antiplatelet agents include, e.g., aspirin (e.g., Bayer's aspirin), clopidogrel (Sanofi-Synthelabo/Bristol-Myers Squibb's Plavix), and ticlopidine (e.g., Sanofi-Synthelabo's Ticlid and Daiichi's Panaldine). Other aspirin-like compounds useful in combination with a dsRNA targeting APOC3 include, e.g., Asacard (slow-release aspirin, by Pharmacia) and Pamicogrel (Kanebo/Angelini Ricerche/CEPA). Exemplary angiotensin-converting enzyme inhibitors include, e.g., ramipril (e.g., Aventis' Altace) and enalapril (e.g., Merck & Co.'s Vasotec). Exemplary acyl CoA cholesterol acetyltransferase (AC AT) inhibitors include, e.g., avasimibe (Pfizer), eflucimibe (BioMsrieux Pierre Fabre/Eli Lilly), CS-505 (Sankyo and Kyoto), and SMP-797 (Sumito). Exemplary cholesterol absorption inhibitors include, e.g., ezetimibe (Merck/Schering-Plough Pharmaceuticals Zetia®) and Pamaqueside (Pfizer). Exemplary CETP inhibitors include, e.g., Torcetrapib (also called CP-529414, Pfizer), JTT-705 (Japan Tobacco), and CETi-I (Avant Immunotherapeutics). Exemplary microsomal triglyceride transfer protein (MTTP) inhibitors include, e.g., implitapide (Bayer), R-103757 (Janssen), and CP-346086 (Pfizer). Other exemplary cholesterol modulators include, e.g., NO-1886 (Otsuka/TAP Pharmaceutical), CI-1027 (Pfizer), and WAY-135433 (Wyeth-Ayerst).

[0750] Exemplary bile acid modulators include, e.g., HBS-107 (Hisamitsu/Banyu), Btg-511 (British Technology Group), BARI-1453 (Aventis), S-8921 (Shionogi), SD-5613 (Pfizer), and AZD-7806 (AstraZeneca). Exemplary peroxisome proliferation activated receptor (PPAR) agonists include, e.g., tesaglitazar (AZ-242) (AstraZeneca), Netoglitazone (MCC-555) (Mitsubishi/Johnson & Johnson), GW-409544 (Ligand Pharniaceuticals/GlaxoSmithKline), GW-501516 (Ligand Pharmaceuticals/GlaxoSmithKline), LY-929 (Ligand Pharmaceuticals and Eli Lilly), LY-465608 (Ligand Pharmaceuticals and Eli Lilly), LY-518674 (Ligand Pharmaceuticals and Eli Lilly), and MK-767 (Merck and Kyorin). Exemplary gene-based therapies include, e.g., AdGWEGF 121.10 (GenVec), ApoAl (UCB Pharma/Groupe Fournier), EG-004 (Trinam) (Ark Therapeutics), and ATP-binding cassette transporter-A1 (ABCA1) (CV Therapeutics/Incyte, Aventis, Xenon). Exemplary Glycoprotein IIb/IIIa inhibitors include, e.g., roxifiban (also called DMP754, Bristol-Myers Squibb), Gantofiban (Merck KGaA/Yamanouchi), and Cromafiban (Millennium Pharmaceuticals). Exemplary squalene synthase inhibitors include, e.g., BMS-1884941 (Bristol-Myers Squibb), CP-210172 (Pfizer), CP-295697 (Pfizer), CP-294838 (Pfizer), and TAK-475 (Takeda). An exemplary MCP-I inhibitor is, e.g., RS-504393 (Roche Bioscience). The anti-atherosclerotic agent BO-653 (Chugai Pharmaceuticals), and the nicotinic acid derivative Nyclin (Yamanouchi Pharmacuticals) are also appropriate for administering in combination with a dsRNA featured in the invention. Exemplary combination therapies suitable for administration with a dsRNA targeting APOC3 include, e.g., advicor (Niacin/lovastatin from Kos Pharmaceuticals), amlodipine/atorvastatin (Pfizer), and ezetimibe/simvastatin (e.g., Vytorin® 10/10, 10/20, 10/40, and 10/80 tablets by Merck/Schering-Plough Pharmaceuticals). Agents for treating hypertriglyceridemia, and suitable for administration in combination with a dsRNA targeting APOC3 include, e.g., lovastatin, niacin Altoprev® Extended-Release Tablets (Andrx Labs), lovastatin Caduet® Tablets (Pfizer), amlodipine besylate, atorvastatin calcium Crestor® Tablets (AstraZeneca), rosuvastatin calcium Lescol® Capsules (Novartis), fluvastatin sodium Lescol® (Reliant, Novartis), fluvastatin sodium Lipitor® Tablets (Parke-Davis), atorvastatin calcium Lofibra® Capsules (Gate), Niaspan Extended-Release Tablets (Kos), niacin Pravachol Tablets (Bristol-Myers Squibb), pravastatin sodium TriCor® Tablets (Abbott), fenofibrate Vytorin® 10/10 Tablets (Merck/Schering-Plough Pharmaceuticals), ezetimibe, simvastatin WelChol™ Tablets (Sankyo), colesevelam hydrochloride Zetia® Tablets (Schering), ezetimibe Zetia® Tablets (Merck/Schering-Plough Pharmaceuticals), and ezetimibe Zocor® Tablets (Merck).

[0751] In one embodiment, an iRNA agent is administered in combination with a PCSK9 inhibitor. In one embodiment, the PCSK9 inhibitor is an anti-PCSK9 monoclonal antibody, e.g., evolocumab (Repatha®) and alirocumab (Praluent®). In another embodiment, the PCSK9 inhibitor is a dsRNA agent targeting PCSK9, e.g., Inclisiran. In one embodiment, the iRNA agent is administered to the patient, and then the additional therapeutic agent is administered to the patient (or vice versa). In another embodiment, the iRNA agent and the additional therapeutic agent are administered at the same time.

[0752] In one embodiment, an iRNA agent is administered in combination with ezetimibe/simvastatin combination (e.g., Vytorin® (Merck/Schering-Plough Pharmaceuticals)). In one embodiment, the iRNA agent is administered to the patient, and then the additional therapeutic agent is administered to the patient (or vice versa). In another embodiment, the iRNA agent and the additional therapeutic agent are administered at the same time.

[0753] The iRNA agent and an additional therapeutic agent and/or treatment may be administered at the same time and/or in the same combination, e.g., parenterally, or the additional therapeutic agent can be administered as part of a separate composition or at separate times and/or by another method known in the art or described herein.

### VIII. Kits

[0754] In certain aspects, the instant disclosure provides kits that include a suitable container containing a pharmaceutical formulation of a siRNA compound, e.g., a double-stranded siRNA compound, or ssiRNA compound, (e.g., a precursor, e.g., a larger siRNA compound which can be processed into a ssiRNA compound, or a DNA which encodes an siRNA compound, e.g., a double-stranded siRNA compound, or ssiRNA compound, or precursor thereof).

[0755] Such kits include one or more dsRNA agent(s) and instructions for use, e.g., instructions for administering a prophylactically or therapeutically effective amount of a dsRNA agent(s). The dsRNA agent may be in a vial or a pre-filled syringe. The kits may optionally further comprise means for administering the dsRNA agent (e.g., an injection device, such as a pre-filled syringe), or means for measuring the inhibition of APOC3 (e.g., means for measuring the inhibition of APOC3 mRNA, APOC3 protein, and/or APOC3 activity). Such means for measuring the inhibition of APOC3 may comprise a means for obtaining a sample from a subject, such as, e.g., a plasma sample. The kits of the invention may optionally further comprise means for determining the therapeutically effective or prophylactically effective amount.

[0756] In certain embodiments the individual components of the pharmaceutical formulation may be provided in one container, e.g., a vial or a pre-filled syringe. Alternatively, it may be desirable to provide the components of the pharmaceutical formulation separately in two or more containers, e.g., one container for a siRNA compound preparation, and at least another for a carrier compound. The kit may be packaged in a number of different configurations such as one or more containers in a single box. The different components can be combined, e.g., according to instructions provided with the kit. The components can be combined according to a method described herein, e.g., to prepare and administer a pharmaceutical composition. The kit can also include a delivery device.

[0757] This invention is further illustrated by the following examples which should not be construed as limiting. The entire contents of all references, patents and published patent applications cited throughout this application, as well as the informal Sequence Listing and Figures, are hereby incorporated herein by reference.

### EXAMPLES

### Example 1. iRNA Synthesis

### Source of Reagents

[0758] Where the source of a reagent is not specifically given herein, such reagent can be obtained from any supplier of reagents for molecular biology at a quality/purity standard for application in molecular biology.

siRNA Design

[0759] siRNAs targeting the human Apolipoprotein C3 (APOC3) gene (human: NCBI refseqID NM_000040.3; NCBI GeneID: 345) were designed using custom R and Python scripts. The human NM_000040.3 REFSEQ mRNA, has a length of 535 bases.

[0760] Detailed lists of the unmodified APOC3 sense and antisense strand nucleotide sequences are shown in Tables 2 and 4. Detailed lists of the modified apolipoprotein C3 sense and antisense strand nucleotide sequences are shown in Tables 3 and 5.

[0761] It is to be understood that, throughout the application, a duplex name without a decimal is equivalent to a duplex name with a decimal which merely references the batch number of the duplex. For example, AD-959917 is equivalent to AD-959917.1.

siRNA Synthesis

[0762] siRNAs were synthesized and annealed using routine methods known in the art.

[0763] Briefly, siRNA sequences were synthesized on a 1 μmol scale using a Mermade 192 synthesizer (BioAutomation) with phosphoramidite chemistry on solid supports. The solid support was controlled pore glass (500-1000 Å) loaded with a custom GalNAc ligand (3′-GalNAc conjugates), universal solid support (AM Chemicals), or the first nucleotide of interest. Ancillary synthesis reagents and standard 2-cyanoethyl phosphoramidite monomers (2′-deoxy-2′-fluoro, 2′-O-methyl, RNA, DNA) were obtained from Thermo-Fisher (Milwaukee, WI), Hongene (China), or Chemgenes (Wilmington, MA, USA). Additional phosphoramidite monomers were procured from commercial suppliers, prepared in-house, or procured using custom synthesis from various CMOs. Phosphoramidites were prepared at a concentration of 100 mM in either acetonitrile or 9:1 acetonitrile:DMF and were coupled using 5-Ethylthio-1H-tetrazole (ETT, 0.25 M in acetonitrile) with a reaction time of 400 s. Phosphorothioate linkages were generated using a 100 mM solution of 3-((Dimethylamino-methylidene) amino)-3H-1,2,4-dithiazole-3-thione (DDTT, obtained from Chemgenes (Wilmington, MA, USA)) in anhydrous acetonitrile/pyridine (9:1 v/v). Oxidation time was 5 minutes. All sequences were synthesized with final removal of the DMT group (“DMT-Off”).

[0764] Upon completion of the solid phase synthesis, solid-supported oligoribonucleotides were treated with 300 μL of Methylamine (40% aqueous) at room temperature in 96 well plates for approximately 2 hours to afford cleavage from the solid support and subsequent removal of all additional base-labile protecting groups. For sequences containing any natural ribonucleotide linkages (2′-OH) protected with a tert-butyl dimethyl silyl (TBDMS) group, a second deprotection step was performed using TEA.3HF (triethylamine trihydrofluoride). To each oligonucleotide solution in aqueous methylamine was added 200 μL of dimethyl sulfoxide (DMSO) and 300 μL TEA.3HF and the solution was incubated for approximately 30 mins at 60° C. After incubation, the plate was allowed to come to room temperature and crude oligonucleotides were precipitated by the addition of 1 mL of 9:1 acetontrile:ethanol or 1:1 ethanol:isopropanol. The plates were then centrifuged at 4° C. for 45 mins and the supernatant carefully decanted with the aid of a multichannel pipette. The oligonucleotide pellet was resuspended in 20 mM NaOAc and subsequently desalted using a HiTrap size exclusion column (5 mL, GE Healthcare) on an Agilent LC system equipped with an autosampler, UV detector, conductivity meter, and fraction collector. Desalted samples were collected in 96 well plates and then analyzed by LC-MS and UV spectrometry to confirm identity and quantify the amount of material, respectively.

[0765] Duplexing of single strands was performed on a Tecan liquid handling robot. Sense and antisense single strands were combined in an equimolar ratio to a final concentration of 10 μM in 1×PBS in 96 well plates, the plate sealed, incubated at 100° C. for 10 minutes, and subsequently allowed to return slowly to room temperature over a period of 2-3 hours. The concentration and identity of each duplex was confirmed and then subsequently utilized for in vitro screening assays.

### Example 2. In Vitro Screening Methods

### Cell Culture and 384-Well Transfections

[0766] Hep3b cells (ATCC, Manassas, VA) were grown to near confluence at 37° C. in an atmosphere of 5% CO₂ in Eagle's Minimum Essential Medium (Gibco) supplemented with 10% FBS (ATCC) before being released from the plate by trypsinization. Transfection was carried out by adding 14.8 μl of Opti-MEM plus 0.2 μl of Lipofectamine RNAiMax per well (Invitrogen, Carlsbad CA. cat #13778-150) to 5 μl of each siRNA duplex to an individual well in a 96-well plate. The mixture was then incubated at room temperature for 15 minutes. Eighty μl of complete growth media without antibiotic containing ˜2×10⁴ Hep3B cells were then added to the siRNA mixture. Cells were incubated for 24 hours prior to RNA purification. Single dose experiments were performed at 10 nM and 0.1 nM final duplex concentration and dose response experiments were done using 8×5-fold serial dilutions over the range of 10 nM to 128 pM.

Total RNA Isolation Using DYNABEADS mRNA Isolation Kit (Invitrogen™ Part #: 610-12)

[0767] Cells were lysed in 75 μl of Lysis/Binding Buffer containing 3 μL of beads per well and mixed for 10 minutes on an electrostatic shaker. The washing steps were automated on a Biotek EL406, using a magnetic plate support. Beads were washed (in 90 μL) once in Buffer A, once in Buffer B, and twice in Buffer E, with aspiration steps in between. Following a final aspiration, complete 10 μL RT mixture was added to each well, as described below.

cDNA Synthesis Using ABI High Capacity cDNA Reverse Transcription Kit (Applied Biosystems, Foster City, CA, Cat #4368813)

[0768] A master mix of 1 μl 10× Buffer, 0.4 μl 25× dNTPs, 1 μl Random primers, 0.5 μl Reverse Transcriptase, 0.5 μl RNase inhibitor and 0.6 μl of H₂O per reaction were added per well. Plates were sealed, agitated for 10 minutes on an electrostatic shaker, and then incubated at 37 degrees C. for 2 hours. Following this, the plates were agitated at 80 degrees C. for 8 minutes.

Real time PCR

[0769] Two microlitre (μl) of cDNA were added to a master mix containing 0.5 μl of human GAPDH TaqMan Probe (4326317E), 0.5 μl human APOC3, 2 μl nuclease-free water and 5 μl Lightcycler 480 probe master mix (Roche Cat #04887301001) per well in a 384 well plates (Roche cat #04887301001). Real time PCR was done in a LightCycler480 Real Time PCR system (Roche).

[0770] To calculate relative fold change, data were analyzed using the ΔΔCt method and normalized to assays performed with cells transfected with 10 nM AD-1955, or mock transfected cells. IC₅₀s were calculated using a 4 parameter fit model using XLFit and normalized to cells transfected with AD-1955 or mock-transfected. The sense and antisense sequences of AD-1955 are: sense: cuuAcGcuGAGuAcuucGAdTsdT (SEQ ID NO:22) and antisense UCGAAGuACUcAGCGuAAGdTsdT (SEQ ID NO:23).

[0771] The results of the screening of the dsRNA agents listed in Tables 3 and 5 in Hep3B cells are shown in Tables 6 and 7, respectively.

TABLE 1
Abbreviations of nucleotide monomers used in nucleic acid sequence
representation. It will be understood that these monomers, when
present in an oligonucleotide, are mutually linked
by 5′-3′-phosphodiester bonds.

| Abbreviation | Nucleotide(s) |
|---|---|
| A | Adenosine-3′-phosphate |
| Ab | beta-L-adenosine-3′-phosphate |
| Abs | beta-L-adenosine-3′-phosphorothioate |
| Af | 2′-fluoroadenosine-3′-phosphate |
| Afs | 2′-fluoroadenosine-3′-phosphorothioate |
| As | adenosine-3′-phosphorothioate |
| C | cytidine-3′-phosphate |
| Cb | beta-L-cytidine-3′-phosphate |
| Cbs | beta-L-cytidine-3′-phosphorothioate |
| Cf | 2′-fluorocytidine-3′-phosphate |
| Cfs | 2′-fluorocytidine-3′-phosphorothioate |
| Cs | cytidine-3′-phosphorothioate |
| G | guanosine-3′-phosphate |
| Gb | beta-L-guanosine-3′-phosphate |
| Gbs | beta-L-guanosine-3′-phosphorothioate |
| Gf | 2′-fluoroguanosine-3′-phosphate |
| Gfs | 2′-fluoroguanosine-3′-phosphorothioate |
| Gs | guanosine-3′-phosphorothioate |
| T | 5′-methyluridine-3′-phosphate |
| Tf | 2′-fluoro-5-methyluridine-3′-phosphate |
| Tfs | 2′-fluoro-5-methyluridine-3′-phosphorothioate |
| Ts | 5-methyluridine-3′-phosphorothioate |
| U | Uridine-3′-phosphate |
| Uf | 2′-fluorouridine-3′-phosphate |
| Ufs | 2′-fluorouridine-3′-phosphorothioate |
| Us | uridine-3′-phosphorothioate |
| N | any nucleotide, modified or unmodified |
| a | 2′-O-methyladenosine-3′-phosphate |
| as | 2′-O-methyladenosine-3′- phosphorothioate |
| c | 2′-O-methylcytidine-3′-phosphate |
| cs | 2′-O-methylcytidine-3′- phosphorothioate |
| g | 2′-O-methylguanosine-3′-phosphate |
| gs | 2′-O-methylguanosine-3′- phosphorothioate |
| t | 2′-O-methyl-5-methyluridine-3′-phosphate |
| ts | 2′-O-methyl-5-methyluridine-3′-phosphorothioate |
| u | 2′-O-methyluridine-3′-phosphate |
| us | 2′-O-methyluridine-3′-phosphorothioate |
| s | phosphorothioate linkage |
| L10 | N-(cholesterylcarboxamidocaproyl)-4- |
| | hydroxyprolinol (Hyp-C6-Chol) |
| L96 | N-[tris(GalNAc-alkyl)-amidodecanoyl)]-4- |
| | hydroxyprolinol (Hyp-(GalNAc-alkyl)3) |
| Y34 | 2-hydroxymethyl-tetrahydrofurane-4-methoxy-3- |
| | phosphate (abasic 2′-OMe furanose) |
| Y44 | inverted abasic DNA (2-hydroxymethyl- |
| | tetrahydrofurane-5-phosphate) |
| (Agn) | Adenosine-glycol nucleic acid (GNA) |
| (Cgn) | Cytidine-glycol nucleic acid (GNA) |
| (Ggn) | Guanosine-glycol nucleic acid (GNA) |
| (Tgn) | Thymidine-glycol nucleic acid (GNA) S-Isomer |
| P | Phosphate |
| VP | Vinyl-phosphonate |
| dA | 2′-deoxyadenosine-3′-phosphate |
| dAs | 2′-deoxyadenosine-3′-phosphorothioate |
| dC | 2′-deoxycytidine-3′-phosphate |
| dCs | 2′-deoxycytidine-3′-phosphorothioate |
| dG | 2′-deoxyguanosine-3′-phosphate |
| dGs | 2′-deoxyguanosine-3′-phosphorothioate |
| dT | 2′-deoxythymidine-3′-phosphate |
| dTs | 2′-deoxythymidine-3′-phosphorothioate |
| dU | 2′-deoxyuridine |
| dUs | 2′-deoxyuridine-3′-phosphorothioate |
| (C2p) | cytidine-2′-phosphate |
| (G2p) | guanosine-2′-phosphate |
| (U2p) | uridine-2′-phosphate |
| (A2p) | adenosine-2′-phosphate |
| (Chd) | 2′-O-hexadecyl-cytidine-3′-phosphate |
| (Ahd) | 2′-O-hexadecyl-adenosine-3′-phosphate |
| (Ghd) | 2′-O-hexadecyl-guanosine-3′-phosphate |
| (Uhd) | 2′-O-hexadecyl-uridine-3′-phosphate |
| i | 2′-O-methylionsine-3′-phosphate |

TABLE 2
Unmodified Sense and Antisense Strand Sequences of Apolipoprotein C3 dsRNA Agents

| | | | | | Antisense | | | |
|---|---|---|---|---|---|---|---|---|
| | Sense Sequence | SEQ ID | | | Sequence | SEQ ID | | |
| Duplex ID | 5′ to 3′ | NO: | Source Name | Range | 5′ to 3′ | NO: | Source Name | Range |
| AD- | CUUCAGUUCCCUGAAAG | 24 | NM_000040.3_245- | 245-265 | AAGUCUUUCAGGGAACU | 25 | NM_000040.3_243- | 243-265 |
| 959917.1 | ACUU | | 265_A21U_s | | GAAGCC | | 265_U1A_as | |
| AD- | UUCAGUUCCCUGAAAGA | 26 | NM_000040.3_246- | 246-266 | AUAGUCUUUCAGGGAAC | 27 | NM_000040.3_244- | 244-266 |
| 959918.1 | CUAU | | 266_C21U_s | | UGAAGC | | 266_G1A_as | |
| AD- | CCAAUAAAGCUGGACAA | 28 | NM_000040.3_506- | 506-526 | AUUCUUGUCCAGCUUUA | 29 | NM_000040.3_504- | 504-526 |
| 960096.1 | GAAU | | 526_G21U_s | | UUGGGA | | 526_C1A_as | |
| AD- | AAAAGGGACAGUAUUCU | 30 | NM_000040.3_435- | 435-455 | ACUGAGAAUACUGUCCC | 31 | NM_000040.3_433- | 433-455 |
| 960064.1 | CAGU | | 455_s | | UUUUAA | | 455_as | |
| AD- | AUGGCUUCAGUUCCCUG | 32 | NM_000040.3_241- | 241-261 | AUUUCAGGGAACUGAA | 33 | NM_000040.3_239- | 239-261 |
| 959914.1 | AAAU | | 261_G21U_s | | GCCAUCG | | 261_C1A_as | |
| AD- | AGCACCGUUAAGGACAA | 34 | NM_000040.3_270- | 270-290 | AAACUUGUCCUUAACGG | 35 | NM_000040.3_268- | 268-290 |
| 959941.1 | GUUU | | 290_C21U_s | | UGCUCC | | 290_G1A_as | |
| AD- | UAAAAGGGACAGUAUUC | 36 | NM_000040.3_434- | 434-454 | AUGAGAAUACUGUCCCU | 37 | | 432-454 |
| 960031.1 | UCAU | | 454_G21U_s | | UUUAAG | | | |
| AD- | ACCGAUGGCUUCAGUUC | 38 | NM_000040.3_237- | 237-257 | AAGGGAACUGAAGCCAU | 39 | NM_000040.3_235- | 235-257 |
| 959910.1 | CCUU | | 257_G21U_s | | CGGUCA | | 257_C1A_as | |
| AD- | UUAAAAGGGACAGUAUU | 40 | NM_000040.3_433- | 433-453 | AGAGAAUACUGUCCCUU | 41 | NM_000040.3_431- | 431-453 |
| 960063.1 | CUCU | | 453_A21U_s | | UUAAGC | | 453_U1A_as | |
| AD- | GCUUCAGUUCCCUGAAA | 42 | NM_000040.3_244- | 244-264 | AGUCUUUCAGGGAACUG | 43 | NM_000040.3_242- | 242-264 |
| 959916.1 | GACU | | 264_s | | AAGCCA | | 264_as | |
| AD- | GAUGGCUUCAGUUCCCU | 44 | NM_000040.3_240- | 240-260 | AUUCAGGGAACUGAAGC | 45 | NM_000040.3_238- | 238-260 |
| 959913.1 | GAAU | | 260_A21U_s | | CAUCGG | | 260_U1A_as | |
| AD- | AAGGGACAGUAUUCUCA | 46 | NM_000040.3_437- | 437-457 | ACACUGAGAAUACUGUC | 47 | NM_000040.3_435- | 435-457 |
| 960066.1 | GUGU | | 457_C21U_s | | CCUUUU | | 457_G1A_as | |
| AD- | CUUAAAAGGGACAGUAU | 48 | NM_000040.3_432- | 432-452 | AAGAAUACUGUCCCUUU | 49 | NM_000040.3_430- | 430-452 |
| 960062.1 | UCUU | | 452_C21U_s | | UAAGCA | | 452_G1A_as | |
| AD- | CUCCCAAUAAAGCUGGA | 50 | NM_000040.3_503- | 503-523 | AUUGUCCAGCUUUAUUG | 51 | NM_000040.3_501- | 501-523 |
| 960093.1 | CAAU | | 523_G21U_s | | GGAGGC | | 523_C1A_as | |
| AD- | UGCUUAAAAGGGACAGU | 52 | NM_000040.3_430- | 430-450 | AAAUACUGUCCCUUUUA | 53 | NM_000040.3_428- | 428-450 |
| 960061.1 | AUUU | | 450_C21U_s | | AGCAAC | | 450_G1A_as | |
| AD- | CCUCCCAAUAAAGCUGG | 54 | NM_000040.3_502- | 502-522 | AUGUCCAGCUUUAUUGG | 55 | NM_000040.3_500- | 500-522 |
| 960092.1 | ACAU | | 522_A21U_s | | GAGGCC | | 522_U1A_as | |
| AD- | GCUUAAAAGGGACAGUA | 56 | NM_000040.3_431- | 431-451 | AGAAUACUGUCCCUUUU | 57 | NM_000040.1_428- | 429-451 |
| 960030.1 | UUCU | | 451_s | | AAGCAA | | 450_as | |
| AD-80794. | CUUAAAAGGGACAGUAU | 13 | NM_000040.11_433- | 433-452 | UAGAAUACUGUCCCUUU | 58 | NM_000040.11_ | 433-452 |
| 6 | UCUA | | 452_C21A_s | | UAAGCA | | 433-452_C21A_s | |
| AD- | CCCAAUAAAGCUGGACA | 59 | NM_000040.3_505- | 505-525 | AUCUUGUCCAGCUUUAU | 60 | NM_000040.3_503- | 503-525 |
| 960095.1 | AGAU | | 525_A21U_s | | UGGGAG | | 525_U1A_as | |
| AD- | CUGGAGCACCGUUAAGG | 61 | NM_000040.3_266- | 266-286 | AUGUCCUUAACGGUGCU | 62 | NM_000040.3_264- | 264-286 |
| 959938.1 | ACAU | | 286_A21U_s | | CCAGUA | | 286_U1A_as | |
| AD- | AAAGGGACAGUAUUCUC | 63 | NM_000040.3_436- | 436-456 | AACUGAGAAUACUGUCC | 64 | NM_000040.3_434- | 434-456 |
| 960065.1 | AGUU | | 456_G21U_s | | CUUUUA | | 456_C1A_as | |
| AD- | GUGACCGAUGGCUUCAG | 65 | NM_000040.3_234- | 234-254 | AGAACUGAAGCCAUCGG | 66 | NM_000040.3_232- | 232-254 |
| 959907.1 | UUCU | | 254_C21U_s | | UCACCC | | 254_G1A_as | |
| AD- | UCCCAAUAAAGCUGGAC | 67 | NM_000040.3_504- | 504-524 | ACUUGUCCAGCUUUAUU | 68 | NM_000040.3_502- | 502-524 |
| 960094.1 | AAGU | | 524_A21U_s | | GGGAGG | | 524_U1A_as | |
| AD- | GGUUGCUUAAAAGGGAC | 69 | NM_000040.3_427- | 427-447 | AACUGUCCCUUUUAAGC | 70 | NM_000040.3_425- | 425-447 |
| 960060.1 | AGUU | | 447_A21U_s | | AACCUA | | 447_U1A_as | |
| AD- | UCAGUUCCCUGAAAGAC | 71 | NM_000040.3_247- | 247-267 | AGUAGUCUUUCAGGGA | 72 | NM_000040.3_245- | 245-267 |
| 959919.1 | UACU | | 267_s | | ACUGAAG | | 267_as | |
| AD- | AGACUACUGGAGCACCG | 73 | NM_000040.3_260- | 260-280 | AUAACGGUGCUCCAGUA | 74 | NM_000040.3_258- | 258-280 |
| 959932.1 | UUAU | | 280_A21U_s | | GUCUUU | | 280_U1A_as | |
| AD- | CCACCAAGACCGCCAAG | 75 | NM_000040.3_163- | 163-183 | AAUCCUUGGCGGUCUUG | 76 | NM_000040.3_161- | 161-183 |
| 959859.1 | GAUU | | 183_G21U_s | | GUGGCG | | 183_C1A_as | |
| AD- | UGACCGAUGGCUUCAGU | 77 | NM_000040.3_235- | 235-255 | AGGAACUGAAGCCAUCG | 78 | NM_000040.3_233- | 233-255 |
| 959908.1 | UCCU | | 255_C21U_s | | GUCACC | | 255_G1A_as | |
| AD- | CUGGGUGACCGAUGGCU | 79 | NM_000040.3_230- | 230-250 | AUGAAGCCAUCGGUCAC | 80 | NM_000040.3_228- | 228-250 |
| 959903.1 | UCAU | | 250_G21U_s | | CCAGCC | | 250_C1A_as | |
| AD- | CAAUAAAGCUGGACAAG | 81 | NM_000040.3_507- | 507-527 | ACUUCUUGUCCAGCUUU | 82 | NM_000040.3_505- | 505-527 |
| 960097.1 | AAGU | | 527_C21U_s | | AUUGGG | | 527_G1A_as | |
| AD- | CGAUGGCUUCAGUUCCC | 83 | NM_000040.3_239- | 239-259 | AUCAGGGAACUGAAGCC | 84 | NM_000040.3_237- | 237-259 |
| 959912.1 | UGAU | | 259_A21U_s | | AUCGGU | | 259_U1A_as | |
| AD- | AGGGACAGUAUUCUCAG | 85 | NM_000040.3_438- | 438-458 | AGCACUGAGAAUACUGU | 86 | NM_000040.3_436- | 436-458 |
| 960067.1 | UGCU | | 458_s | | CCCUUU | | 458_as | |
| AD- | CUGAAAGACUACUGGAG | 87 | NM_000040.3_255- | 255-275 | AGUGCUCCAGUAGUCUU | 88 | NM_000040.3_253- | 253-275 |
| 959927.1 | CACU | | 275_C21U_s | | UCAGGG | | 275_G1A_as | |
| AD- | AUAAAGCUGGACAAGAA | 89 | NM_000040.3_509- | 509-529 | AAGCUUCUUGUCCAGCU | 90 | NM_000040.3_507- | 507-529 |
| 960099.1 | GCUU | | 529_G21U_s | | UUAUUG | | 529_C1A_as | |
| AD- | AAGACUACUGGAGCACC | 91 | NM_000040.3_259- | 259-279 | AAACGGUGCUCCAGUAG | 92 | NM_000040.3_257- | 257-279 |
| 959931.1 | GUUU | | 279_A21U_s | | UCUUUC | | 279_U1A_as | |
| AD- | UGGCUUCAGUUCCCUGA | 93 | NM_000040.3_242- | 242-262 | ACUUUCAGGGAACUGAA | 94 | | 240-262 |
| 959879.1 | AAGU | | 262_A21U_s | | GCCAUC | | | |
| AD- | GCCUCCCAAUAAAGCUG | 95 | NM_000040.3_501- | 501-521 | AGUCCAGCUUUAUUGGG | 96 | NM_000040.3_499- | 499-521 |
| 960091.1 | GACU | | 521_A21U_s | | AGGCCA | | 521 U1A_as | |
| AD- | AGUUCCCUGAAAGACUA | 97 | NM_000040.3_249- | 249-269 | ACAGUAGUCUUUCAGGG | 98 | NM_000040.3247- | 247-269 |
| 959921.1 | CUGU | | 269_G21U_s | | AACUGA | | 269_C1A_as | |
| AD- | AAGCUGGACAAGAAGCU | 99 | NM_000040.3_512- | 512-532 | AAGCAGCUUCUUGUCCA | 100 | NM_000040.3_510- | 510-532 |
| 960102.1 | GCUU | | 532_A21U_s | | GCUUUA | | 532 U1A_as | |
| AD-80793. | GCUGGACAAGAAGCUGC | 101 | NM_000040.11_515- | 515-534 | UAUAGCAGCUUCUUGUC | 102 | NM_000040.11_513 | 513-534 |
| 6 | UAUA | | 534_G21A_s | | CAGCUU | | -534_G21A_as | |
| AD- | CCCUGAAAGACUACUGG | 103 | 253-273 | | AGCUCCAGUAGUCUUUC | 104 | NM_000040.3251- | 251-273 |
| 959925.1 | AGCU | | | | AGGGAA | | 273_U1A_as | |
| AD- | AAUAAAGCUGGACAAGA | 105 | NM_000040.3_508- | 508-528 | AGCUUCUUGUCCAGCUU | 106 | NM_000040.3_506- | 506-528 |
| 960098.1 | AGCU | | 528_s | | UAUUGG | | 528_as | |
| AD- | GGCUGGGUGACCGAUGG | 107 | NM_000040.3_228- | 228-248 | AAAGCCAUCGGUCACCC | 108 | NM_000040.3_226- | 226-248 |
| 959901.1 | CUUU | | 248_C21U_s | | AGCCCC | | 248_G1A_as | |
| AD- | CAGUUCCCUGAAAGACU | 109 | NM_000040.3_248- | 248-268 | AAGUAGUCUUUCAGGG | 110 | NM_000040.3_246- | 246-268 |
| 959920.1 | ACUU | | 268_G21U_s | | AACUGAA | | 268_C1A_as | |
| AD- | CCUGAAAGACUACUGGA | 111 | NM_000040.3_254- | 254-274 | AUGCUCCAGUAGUCUUU | 112 | NM_000040.3_252- | 252-274 |
| 959926.1 | GCAU | | 274_C21U_s | | CAGGGA | | 274_G1A_as | |
| AD- | CAUCCCUAGAGGCAGCU | 113 | NM_000040.3_11- | 11-31 | AAGCAGCUGCCUCUAGG | 114 | NM_000040.3_9- | 9-31 |
| 959737.1 | GCUU | | 31_C21U_s | | GAUGAA | | 31_G1A_as | |
| AD- | CUGCCUGAGACCUCAAU | 115 | NM_000040.3_340- | 340-360 | AGGUAUUGAGGUCUCA | 116 | NM_000040.3_338- | 338-360 |
| 960011.1 | ACCU | | 360_C21U_s | | GGCAGCC | | 360_G1A_as | |
| AD- | AAAGCUGGACAAGAAGC | 117 | NM_000040.3_511- | 511-531 | AGCAGCUUCUUGUCCAG | 118 | NM_000040.3_509- | 509-531 |
| 960101.1 | UGCU | | 531_s | | CUUUAU | | 531_as | |
| AD- | UUCCCUGAAAGACUACU | 119 | NM_000040.3_251- | 251-271 | AUCCAGUAGUCUUUCAG | 120 | NM_000040.3_249- | 249-271 |
| 959923.1 | GGAU | | 271_G21U_s | | GGAACU | | 271_C1A_as | |
| AD- | UAGGUUGCUUAAAAGGG | 121 | NM_000040.3_425- | 425-445 | AUGUCCCUUUUAAGCAA | 122 | NM_000040.3_423- | 423-445 |
| 960058.1 | ACAU | | 445_G21U_s | | CCUACA | | 445_C1A_as | |
| AD- | CACCAAGACCGCCAAGG | 123 | NM_000040.3_164- | 164-184 | ACAUCCUUGGCGGUCUU | 124 | NM_000040.3_162- | 162-184 |
| 959860.1 | AUGU | | 184_C21U_s | | GGUGGC | | 184_G1A_as | |
| AD- | AGGUUGCUUAAAAGGGA | 125 | NM_000040.3_426- | 426-446 | ACUGUCCCUUUUAAGCA | 126 | NM_000040.3_424- | 424-446 |
| 960059.1 | CAGU | | 446_s | | ACCUAC | | 446_as | |
| AD- | AGCUGGACAAGAAGCUG | 127 | NM_000040.3_513- | 513-533 | AUAGCAGCUUCUUGUCC | 128 | NM_000040.3_511- | 511-533 |
| 960103.1 | CUAU | | 533_s | | AGCUUU | | 533_as | |
| AD- | CCCUAGAGGCAGCUGCU | 129 | NM_000040.3_14- | 14-34 | AUGGAGCAGCUGCCUCU | 130 | NM_000040.3_12- | 12-34 |
| 959740.1 | CCAU | | 34_G21U_s | | AGGGAU | | 34_C1A_as | |
| AD- | UGGAGCACCGUUAAGGA | 131 | NM_000040.3_267- | 267-287 | AUUGUCCUUAACGGUGC | 132 | NM_000040.3_265- | 265-287 |
| 959939.1 | CAAU | | 287_G21U_s | | UCCAGU | | 287_C 1A_as | |
| AD- | GACCGCCAAGGAUGCAC | 133 | NM_000040.3_170- | 170-190 | AUCAGUGCAUCCUUGGC | 134 | NM_000040.3_168- | 168-190 |
| 959865.1 | UGAU | | 190_G21U_s | | GGUCUU | | 190_C1A_as | |
| AD- | UAAAGCUGGACAAGAAG | 135 | NM_000040.3_510- | 510-530 | ACAGCUUCUUGUCCAGC | 136 | NM_000040.3_508- | 508-530 |
| 960100.1 | CUGU | | 530_C21U_s | | UUUAUU | | 530_G1A_as | |
| AD- | UCCCUGAAAGACUACUG | 137 | NM_000040.3_252- | 252-272 | ACUCCAGUAGUCUUUCA | 138 | NM_000040.3_250- | 250-272 |
| 959924.1 | GAGU | | 272_C21U_s | | GGGAAC | | 272_G1A_as | |
| AD- | GACCGAUGGCUUCAGUU | 139 | NM_000040.3_236- | 236-256 | AGGGAACUGAAGCCAUC | 140 | NM_000040.3_234- | 234-256 |
| 959909.1 | CCCU | | 256_s | | GGUCAC | | 256_as | |
| AD- | UCCCUAGAGGCAGCUGC | 141 | NM_000040.3_13- | 13-33 | AGGAGCAGCUGCCUCUA | 142 | NM_000040.3_11- | 11-33 |
| 959739.1 | UCCU | | 33_A21U_s | | GGGAUG | | 33_U1A_as | |
| AD- | CCGAUGGCUUCAGUUCC | 143 | NM_000040.3_238- | 238-258 | ACAGGGAACUGAAGCCA | 144 | NM_000040.3_236- | 236-258 |
| 959911.1 | CUGU | | 258_A21U_s | | UCGGUC | | 258_U1A_as | |
| AD- | GUAGGUUGCUUAAAAGG | 145 | NM_000040.3_424- | 424-444 | AGUCCCUUUUAAGCAAC | 146 | NM_000040.3_422- | 422-444 |
| 960057.1 | GACU | | 444_A21U_s | | CUACAG | | 444_U1A_as | |
| AD- | CCUAGAGGCAGCUGCUC | 147 | NM_000040.3_15- | 15-35 | ACUGGAGCAGCUGCCUC | 148 | NM_000040.3_13- | 13-35 |
| 959741.1 | CAGU | | 35_G21U_s | | UAGGGA | | 35_C1A_as | |
| AD- | UGUAGGUUGCUUAAAAG | 149 | NM_000040.3_423- | 423-443 | AUCCCUUUUAAGCAACC | 150 | NM_000040.3_421- | 421-443 |
| 960056.1 | GGAU | | 443_C21U_s | | UACAGG | | 443_G1A_as | |
| AD- | AAAGACUACUGGAGCAC | 151 | NM_000040.3_258- | 258-278 | AACGGUGCUCCAGUAGU | 152 | NM_000040.3_256- | 256-278 |
| 959930.1 | CGUU | | 278_s | | CUUUCA | | 278_as | |
| AD- | AGGCAGCUGCUCCAGGA | 153 | NM_000040.3_20- | 20-40 | AUGUUCCUGGAGCAGCU | 154 | NM_000040.3_18- | 18-40 |
| 959746.1 | ACAU | | 40_G21U_s | | GCCUCU | | 40_C1A_as | |
| AD- | GCAGCUGCUCCAGGAAC | 155 | NM_000040.3_22- | 22-42 | AUCUGUUCCUGGAGCAG | 156 | NM_000040.3_20- | 20-42 |
| 959748.1 | AGAU | | 42_G21U_s | | CUGCCU | | 42_C1A_as | |
| AD- | CGCCACCAAGACCGCCA | 157 | NM_000040.3_161- | 161-181 | ACCUUGGCGGUCUUGGU | 158 | NM_000040.3_159- | 159-181 |
| 959857.1 | AGGU | | 181_A21U_s | | GGCGUG | | 181_U1A_as | |
| AD- | CUACUGGAGCACCGUUA | 159 | NM_000040.3_263- | 263-283 | ACCUUAACGGUGCUCCA | 160 | NM_000040.3_261- | 261-283 |
| 959935.1 | AGGU | | 283_A21U_s | | GUAGUC | | 283_U1A_as | |
| AD- | UGGCUGCCUGAGACCUC | 161 | NM_000040.3_337- | 337-357 | AAUUGAGGUCUCAGGCA | 162 | NM_000040.3_335- | 335-357 |
| 960008.1 | AAUU | | 357_A21U_s | | GCCACG | | 357_U1A_as | |
| AD- | GGCUUCAGUUCCCUGAA | 163 | NM_000040.3_243- | 243-263 | AUCUUUCAGGGAACUGA | 164 | NM_000040.3_241- | 241-263 |
| 959915.1 | AGAU | | 263_C21U_s | | AGCCAU | | 263_G1A_as | |
| AD- | AUCCCUAGAGGCAGCUG | 165 | NM_000040.3_12- | 12-32 | AGAGCAGCUGCCUCUAG | 166 | NM_000040.3_10- | 08-32 |
| 959738.1 | CUCU | | 32_C21U_s | | GGAUGA | | 32_G1A_as | |
| AD- | UGAAAGACUACUGGAGC | 167 | NM_000040.3_256- | 256-276 | AGGUGCUCCAGUAGUCU | 168 | NM_000040.3_254- | 254-276 |
| 959928.1 | ACCU | | 276_G21U_s | | UUCAGG | | 276_C1A_as | |
| AD- | AAGACCGCCAAGGAUGC | 169 | NM_000040.3_168- | 168-188 | AAGUGCAUCCUUGGCGG | 170 | NM_000040.3_166- | 166-188 |
| 959863.1 | ACUU | | 188_G21U_s | | UCUUGG | | 188_C1A_as | |
| AD- | GCUGCCUGAGACCUCAA | 171 | NM_000040.3_339- | 339-359 | AGUAUUGAGGUCUCAG | 172 | NM_000040.3_337- | 337-359 |
| 960010.1 | UACU | | 359_C21U_s | | GCAGCCA | | 359_G1A_as | |
| AD- | GGCCUCCCAAUAAAGCU | 173 | NM_000040.3_500- | 500-520 | AUCCAGCUUUAUUGGGA | 174 | NM_000040.3_498- | 498-520 |
| 960090.1 | GGAU | | 520_C21U_s | | GGCCAG | | 520_G1A_as | |
| AD- | CAGUUCAUCCCUAGAGG | 175 | NM_000040.3_6- | 6-26 | ACUGCCUCUAGGGAUGA | 176 | NM_000040.34- | 4-26 |
| 959732.1 | CAGU | | 26_C21U_s_ | | ACUGAG | | 26_G1A_as_ | |
| AD- | GGCUGCCUGAGACCUCA | 177 | NM_000040.3_338- | 338-358 | AUAUUGAGGUCUCAGGC | 178 | NM_000040.3_336- | 336-358 |
| 960009.1 | AUAU | | 358_C21U_s | | AGCCAC | | 358_G1A_as | |
| AD- | GAAAGACUACUGGAGCA | 179 | NM_000040.3_257- | 257-277 | ACGGUGCUCCAGUAGUC | 180 | NM_000040.3_255- | 255-277 |
| 959929.1 | CCGU | | 277_s | | UUUCAG | | 277_as | |
| AD- | GAGGCAGCUGCUCCAGG | 181 | NM_000040.3_19- | 19-39 | AGUUCCUGGAGCAGCUG | 182 | NM_000040.3_17- | 17-39 |
| 959745.1 | AACU | | 39_A21U_s_ | | CCUCUA | | 39_U1A_as_ | |
| AD- | GUGGCUGCCUGAGACCU | 183 | NM_000040.3_336- | 336-356 | AUUGAGGUCUCAGGCAG | 184 | NM_000040.3_334- | 334-356 |
| 960007.1 | CAAU | | 356_s | | CCACGG | | 356_as | |
| AD- | GCUGGGUGACCGAUGGC | 185 | NM_000040.3_229- | 229-249 | AGAAGCCAUCGGUCACC | 186 | NM_000040.3_227- | 227-249 |
| 959902.1 | UUCU | | 249_A21U_s | | CAGCCC | | 249_U1A_as | |
| AD- | GGAGCACCGUUAAGGAC | 187 | NM_000040.3_268- | 268-288 | ACUUGUCCUUAACGGUG | 188 | NM_000040.3_266- | 266-288 |
| 959940.1 | AAGU | | 288_s | | CUCCAG | | 288_as | |
| AD- | CUGUAGGUUGCUUAAAA | 189 | NM_000040.3_422- | 422-442 | ACCCUUUUAAGCAACCU | 190 | NM_000040.3_420- | 420-442 |
| 960055.1 | GGGU | | 442_A21U_s | | ACAGGG | | 442_U1A_as | |
| AD- | GUUCCCUGAAAGACUAC | 191 | NM_000040.3_250- | 250-270 | ACCAGUAGUCUUUCAGG | 192 | NM_000040.3_248- | 248-270 |
| 959922.1 | UGGU | | 270_A21U_s | | GAACUG | | 270_U1A_as | |
| AD- | GGGCUGGGUGACCGAUG | 193 | NM_000040.3_227- | 227-247 | AAGCCAUCGGUCACCCA | 194 | NM_000040.3_225- | 225-247 |
| 959900.1 | GCUU | | 247_s | | GCCCCU | | 247_as | |
| AD- | GCCACCAAGACCGCCAA | 195 | NM_000040.3_162- | 162-182 | AUCCUUGGCGGUCUUGG | 196 | NM_000040.3_160- | 160-182 |
| 959858.1 | GGAU | | 182_s | | UGGCGU | | 182_as | |
| AD- | AGAGGCAGCUGCUCCAG | 197 | NM_000040.3_18- | 18-38 | AUUCCUGGAGCAGCUGC | 198 | NM_000040.3_16- | 16-38 |
| 959744.1 | GAAU | | 38_C21U_s | | CUCUAG | | 38_G1A_as | |
| AD- | UCAUCCCUAGAGGCAGC | 199 | NM_000040.3_10- | 10-30 | AGCAGCUGCCUCUAGGG | 200 | NM_000040.3_8- | 08-30 |
| 959736.1 | UGCU | | 30_s | | AUGAAC | | 30_as | |
| AD- | UUCAUCCCUAGAGGCAG | 201 | NM_000040.3_9- | 9-29 | ACAGCUGCCUCUAGGGA | 202 | NM_000040.3_7- | 29-July |
| 959735.1 | CUGU | | 29_C21U_s | | UGAACU | | 29_G1A_as | |
| AD- | CGAGCUCCUUGGGUCCU | 203 | NM_000040.3_386- | 386-406 | AUGCAGGACCCAAGGAG | 204 | NM_000040.3_384- | 384-406 |
| 960039.1 | GCAU | | 406_A21U_s | | CUCGCA | | 406_U1A_as | |
| AD- | GGCAGCUGCUCCAGGAA | 205 | NM_000040.3_21- | 21-41 | ACUGUUCCUGGAGCAGC | 206 | NM_000040.3_19- | 19-41 |
| 959747.1 | CAGU | | 41_A21U_s | | UGCCUC | | 41_U1A_as | |
| AD- | CCAAGACCGCCAAGGAU | 207 | NM_000040.3_166- | 166-186 | AUGCAUCCUUGGCGGUC | 208 | NM_000040.3_164- | 164-186 |
| 959862.1 | GCAU | | 186_C21U_s | | UUGGUG | | 186_G1A_as | |
| AD- | GACUACUGGAGCACCGU | 209 | NM_000040.3_261- | 261-281 | AUUAACGGUGCUCCAGU | 210 | NM_000040.3_259- | 259-281 |
| 959933.1 | UAAU | | 281_G21U_s | | AGUCUU | | 281_C1A_as | |
| AD- | AGUUCAUCCCUAGAGGC | 211 | NM_000040.3_7- | 7-27 | AGCUGCCUCUAGGGAUG | 212 | NM_000040.3_5- | 5-28 |
| 959733.1 | AGCU | | 27_s | | AACUGA | | 27_as | |
| AD- | ACUGGAGCACCGUUAAG | 213 | NM_000040.3_265- | 265-285 | AGUCCUUAACGGUGCUC | 214 | NM_000040.3_263- | 263-285 |
| 959937.1 | GACU | | 285_A21U_s | | CAGUAG | | 285_U1A_as | |
| AD- | UGGGUGACCGAUGGCUU | 215 | NM_000040.3_231- | 231-251 | ACUGAAGCCAUCGGUCA | 216 | NM_000040.3_229- | 229-251 |
| 959904.1 | CAGU | | 251_s | | CCCAGC | | 251_as | |
| AD- | CCGAGCUUCAGAGGCCG | 217 | NM_000040.3_101- | 101-121 | ACCUCGGCCUCUGAAGC | 218 | NM_000040.3_99- | 99-121 |
| 959797.1 | AGGU | | 121_A21U_s | | UCGGGC | | 121_U1A_as | |
| AD- | ACCAAGACCGCCAAGGA | 219 | NM_000040.3_165- | 165-185 | AGCAUCCUUGGCGGUCU | 220 | NM_000040.3_163- | 163-185 |
| 959861.1 | UGCU | | 185_A21U_s | | UGGUGG | | 185_U1A_as | |
| AD- | UAGAGGCAGCUGCUCCA | 221 | NM_000040.3_17- | 17-37 | AUCCUGGAGCAGCUGCC | 222 | NM_000040.3_15- | 15-37 |
| 959743.1 | GGAU | | 37_A21U_s | | UCUAGG | | 37_U1A_as | |
| AD- | GGGUGACCGAUGGCUUC | 223 | NM_000040.3_232- | 232-252 | AACUGAAGCCAUCGGUC | 224 | NM_000040.3_230- | 230-252 |
| 959905.1 | AGUU | | 252_s | | ACCCAG | | 252_as | |
| AD- | GUUCAUCCCUAGAGGCA | 225 | NM_000040.3_8- | 8-28 | AAGCUGCCUCUAGGGAU | 226 | NM_000040.3_6- | 6-28 |
| 959734.1 | GCUU | | 28_G21U_s | | GAACUG | | 28_C1A_as | |
| AD- | ACUACUGGAGCACCGUU | 227 | NM_000040.3_262- | 262-282 | ACUUAACGGUGCUCCAG | 228 | NM_000040.3_260- | 260-282 |
| 959934.1 | AAGU | | 282_G21U_s | | UAGUCU | | 282_C1A_as | |
| AD- | CAGCUGCUCCAGGAACA | 229 | NM_000040.3_23- | 23-43 | ACUCUGUUCCUGGAGCA | 230 | NM_000040.3_21- | 21-43 |
| 959749.1 | GAGU | | 43_G21U_s | | GCUGCC | | 43_C1A_as | |
| AD- | CGAGCUUCAGAGGCCGA | 231 | NM_000040.3_102- | 102-122 | AUCCUCGGCCUCUGAAG | 232 | NM_000040.3_100- | 100-122 |
| 959798.1 | GGAU | | 122_s | | CUCGGG | | 122_as | |
| AD- | CUAGAGGCAGCUGCUCC | 233 | NM_000040.3_16- | 16-36 | ACCUGGAGCAGCUGCCU | 234 | NM_000040.3_14- | 14-36 |
| 959742.1 | AGGU | | 36_A21U_s | | CUAGGG | | 36_U1A_as | |
| AD- | GAGUCCCAGGUGGCCCA | 235 | NM_000040.3_201- | 201-221 | AUGCUGGGCCACCUGGG | 236 | NM_000040.3_199- | 199-221 |
| 959897.1 | GCAU | | 221_G21U_s | | ACUCCU | | 221_C1A_as | |
| AD- | AGACCGCCAAGGAUGCA | 237 | NM_000040.3_169- | 169-189 | ACAGUGCAUCCUUGGCG | 238 | NM_000040.3_167- | 167-189 |
| 959864.1 | CUGU | | 189_A21U_s | | GUCUUG | | 189_U1A_as | |
| AD- | CCAGGUGGCCCAGCAGG | 239 | NM_000040.3_206- | 206-226 | AUGGCCUGCUGGGCCAC | 240 | NM_000040.3_204- | 204-226 |
| 959899.1 | CCAU | | 226_G21U_s | | CUGGGA | | 226_C1A_as | |
| AD- | ACGCCACCAAGACCGCC | 241 | NM_000040.3_160- | 160-180 | ACUUGGCGGUCUUGGUG | 242 | NM_000040.3_158- | 158-180 |
| 959856.1 | AAGU | | 180_G21U_s | | GCGUGC | | 180_C1A_as | |
| AD- | GGUGACCGAUGGCUUCA | 243 | NM_000040.3_233- | 233-253 | AAACUGAAGCCAUCGGU | 244 | NM_000040.3_231- | 231-253 |
| 959906.1 | GUUU | | 253_C21U_s | | CACCCA | | 253_G1A_as | |
| AD- | UACUGGAGCACCGUUAA | 245 | NM_000040.3_264- | 264-284 | AUCCUUAACGGUGCUCC | 246 | NM_000040.3_262- | 262-284 |
| 959936.1 | GGAU | | 284_C21U_s | | AGUAGU | | 284_G1A_as | |
| AD- | GGAGUCCCAGGUGGCCC | 247 | NM_000040.3_200- | 200-220 | AGCUGGGCCACCUGGGA | 248 | NM_000040.3_198- | 198-220 |
| 959896.1 | AGCU | | 220_A21U_s | | CUCCUG | | 220_U1A_as | |
| AD- | GCAGGAGUCCCAGGUGG | 249 | NM_000040.3_197- | 197-217 | AGGGCCACCUGGGACUC | 250 | NM_000040.3_195- | 195-217 |
| 959893.1 | CCCU | | 217_A21U_s | | CUGCAC | | 217_U1A_as | |
| AD- | UGCAGGAGUCCCAGGUG | 251 | NM_000040.3_196- | 196-216 | AGGCCACCUGGGACUCC | 252 | NM_000040.3_194- | 194-216 |
| 959892.1 | GCCU | | 216_C21U_s | | UGCACG | | 216_G1A_as | |
| AD- | CAGGAGUCCCAGGUGGC | 253 | NM_000040.3_198- | 198-218 | AUGGGCCACCUGGGACU | 254 | NM_000040.3_196- | 196-218 |
| 959894.1 | CCAU | | 218_G21U_s | | CCUGCA | | 218_C1A_as | |
| AD- | AGCUGCUCCAGGAACAG | 255 | NM_000040.3_24- | 24-44 | ACCUCUGUUCCUGGAGC | 256 | NM_000040.3_22- | 22-44 |
| 959750.1 | AGGU | | 44_s | | AGCUGC | | 44_as | |
| AD- | AGUCCCAGGUGGCCCAG | 257 | NM_000040.3_202- | 202-222 | ACUGCUGGGCCACCUGG | 258 | NM_000040.3_200- | 200-222 |
| 959898.1 | CAGU | | 222_G21U_s | | GACUCC | | 222_C1A_as | |
| AD- | AGGAGUCCCAGGUGGCC | 259 | NM_000040.3_199- | 199-219 | ACUGGGCCACCUGGGAC | 260 | NM_000040.3_197- | 197-219 |
| 959895.1 | CAGU | | 219_C21U_s | | UCCUGC | | 219_G1A_as | |

TABLE 3
Modified Sense and Antisense Strand Sequences of Apolipoprotein C3 dsRNA Agents

| Duplex Name | Sense Sequence 5′ to 3′ | SEQ ID NO: | Antisense Sequence 5′ to 3′ | SEQ ID NO: | mRNA target sequence | SEQ ID NO: |
|---|---|---|---|---|---|---|
| AD-959917.1 | csusucagUfuCfCfCfugaaagacuuL96 | 341 | asAfsgucUfuUfCfagggAfaCfugaagscsc | 342 | GGCUUCAGUUCCCUGAAAGACUA | 343 |
| AD-959918.1 | ususcaguUfcCfCfUfgaaagacuauL96 | 344 | asUfsaguCfuUfUfcaggGfaAfcugaasgsc | 345 | GCUUCAGUUCCCUGAAAGACUAC | 346 |
| AD-960096.1 | cscsaauaAfaGfCfUfggacaagaauL96 | 347 | asUfsucuUfgUfCfcagcUfuUfauuggsgsa | 348 | UCCCAAUAAAGCUGGACAAGAAG | 349 |
| AD-960064.1 | asasaaggGfaCfAfGfuauucucaguL96 | 350 | asCfsugaGfaAfUfacugUfcCfcuuuusasa | 351 | UUAAAAGGGACAGUAUUCUCAGU | 352 |
| AD-959914.1 | asusggcuUfcAfGfUfucccugaaauL96 | 353 | asUfsuucAfgGfGfaacuGfaAfgccauscsg | 354 | CGAUGGCUUCAGUUCCCUGAAAG | 355 |
| AD-959941.1 | asgscaccGfuUfAfAfggacaaguuuL96 | 356 | asAfsacuUfgUfCfcuuaAfcGfgugcuscsc | 357 | GGAGCACCGUUAAGGACAAGUUC | 358 |
| AD-960031.1 | usasaaagGfgAfCfAfguauucucauL96 | 359 | asUfsgagAfaUfAfcuguCfcCfuuuuasasg | 360 | CUUAAAAGGGACAGUAUUCUCAG | 361 |
| AD-959910.1 | ascscgauGfgCfUfUfcaguucccuuL96 | 362 | asAfsgggAfaCfUfgaagCfcAfucgguscsa | 363 | UGACCGAUGGCUUCAGUUCCCUG | 364 |
| AD-960063.1 | ususaaaaGfgGfAfCfaguauucucuL96 | 365 | asGfsagaAfuAfCfugucCfcUfuuuaasgsc | 366 | GCUUAAAAGGGACAGUAUUCUCA | 367 |
| AD-959916.1 | gscsuucaGfuUfCfCfcugaaagacuL96 | 368 | asGfsucuUfuCfAfgggaAfcUfgaagcscsa | 369 | UGGCUUCAGUUCCCUGAAAGACU | 370 |
| AD-959913.1 | gsasuggcUfuCfAfGfuucccugaauL96 | 371 | asUfsucaGfgGfAfacugAfaGfccaucsgsg | 372 | CCGAUGGCUUCAGUUCCCUGAAA | 373 |
| AD-960066.1 | asasgggaCfaGfUfAfuucucaguguL96 | 374 | asCfsacuGfaGfAfauacUfgUfcccuususu | 375 | AAAAGGGACAGUAUUCUCAGUGC | 376 |
| AD-960062.1 | csusuaaaAfgGfGfAfcaguauucuuL96 | 377 | asAfsgaaUfaCfUfguccCfuUfuuaagscsa | 378 | UGCUUAAAAGGGACAGUAUUCUC | 379 |
| AD-960093.1 | csuscccaAfuAfAfAfgcuggacaauL96 | 380 | asUfsuguCfcAfGfcuuuAfuUfgggagsgsc | 381 | GCCUCCCAAUAAAGCUGGACAAG | 382 |
| AD-960061.1 | usgscuuaAfaAfGfGfgacaguauuuL96 | 383 | asAfsauaCfuGfUfcccuUfuUfaagcasasc | 384 | GUUGCUUAAAAGGGACAGUAUUC | 385 |
| AD-960092.1 | cscsucccAfaUfAfAfagcuggacauL96 | 386 | asUfsgucCfaGfCfuuuaUfuGfggaggscsc | 387 | GGCCUCCCAAUAAAGCUGGACAA | 388 |
| AD-960030.1 | gscsuuaaAfaGfGfGfacaguauucuL96 | 389 | asGfsaauAfcUfGfucccUfuUfuaagcsasa | 390 | UUGCUUAAAAGGGACAGUAUUCU | 391 |
| AD-80794.6 | csusuaaaAfgGfGfAfcaguauucuaL96 | 17 | usAfsgaaUfaCfUfguccCfuUfuuaagscsa | 392 | CUUAAAAGGGACAGUAUUCUA | 393 |
| AD-960095.1 | cscscaauAfaAfGfCfuggacaagauL96 | 394 | asUfscuuGfuCfCfagcuUfuAfuugggsasg | 395 | CUCCCAAUAAAGCUGGACAAGAA | 396 |
| AD-959938.1 | csusggagCfaCfCfGfuuaaggacauL96 | 397 | asUfsgucCfuUfAfacggUfgCfuccagsusa | 398 | UACUGGAGCACCGUUAAGGACAA | 399 |
| AD-960065.1 | asasagggAfcAfGfUfauucucaguuL96 | 400 | asAfscugAfgAfAfuacuGfuCfccuuususa | 401 | UAAAAGGGACAGUAUUCUCAGUG | 402 |
| AD-959907.1 | gsusgaccGfaUfGfGfcuucaguucuL96 | 403 | asGfsaacUfgAfAfgccaUfcGfgucacscsc | 404 | GGGUGACCGAUGGCUUCAGUUCC | 405 |
| AD-960094.1 | uscsccaaUfaAfAfGfcuggacaaguL96 | 406 | asCfsuugUfcCfAfgcuuUfaUfugggasgsg | 407 | CCUCCCAAUAAAGCUGGACAAGA | 408 |
| AD-960060.1 | gsgsuugcUfuAfAfAfagggacaguuL96 | 409 | asAfscugUfcCfCfuuuuAfaGfcaaccsusa | 410 | UAGGUUGCUUAAAAGGGACAGUA | 411 |
| AD-959919.1 | uscsaguuCfcCfUfGfaaagacuacuL96 | 412 | asGfsuagUfcUfUfucagGfgAfacugasasg | 413 | CUUCAGUUCCCUGAAAGACUACU | 414 |
| AD-959932.1 | asgsacuaCfuGfGfAfgcaccguuauL96 | 415 | asUfsaacGfgUfGfcuccAfgUfagucususu | 416 | AAAGACUACUGGAGCACCGUUAA | 417 |
| AD-959859.1 | cscsaccaAfgAfCfCfgccaaggauuL96 | 418 | asAfsuccUfuGfGfcgguCfuUfgguggscsg | 419 | CGCCACCAAGACCGCCAAGGAUG | 420 |
| AD-959908.1 | usgsaccgAfuGfGfCfuucaguuccuL96 | 421 | asGfsgaaCfuGfAfagccAfuCfggucascsc | 422 | GGUGACCGAUGGCUUCAGUUCCC | 423 |
| AD-959903.1 | csusggguGfaCfCfGfauggcuucauL96 | 424 | asUfsgaaGfcCfAfucggUfcAfcccagscsc | 425 | GGCUGGGUGACCGAUGGCUUCAG | 426 |
| AD-960097.1 | csasauaaAfgCfUfGfgacaagaaguL96 | 427 | asCfsuucUfuGfUfccagCfuUfuauugsgsg | 428 | CCCAAUAAAGCUGGACAAGAAGC | 429 |
| AD-959912.1 | csgsauggCfuUfCfAfguucccugauL96 | 430 | asUfscagGfgAfAfcugaAfgCfcaucgsgsu | 431 | ACCGAUGGCUUCAGUUCCCUGAA | 432 |
| AD-960067.1 | asgsggacAfgUfAfUfucucagugcuL96 | 433 | asGfscacUfgAfGfaauaCfuGfucccususu | 434 | AAAGGGACAGUAUUCUCAGUGCU | 435 |
| AD-959927.1 | csusgaaaGfaCfUfAfcuggagcacuL96 | 436 | asGfsugcUfcCfAfguagUfcUfuucagsgsg | 437 | CCCUGAAAGACUACUGGAGCACC | 438 |
| AD-960099.1 | asusaaagCfuGfGfAfcaagaagcuuL96 | 439 | asAfsgcuUfcUfUfguccAfgCfuuuaususg | 440 | CAAUAAAGCUGGACAAGAAGCUG | 441 |
| AD-959931.1 | asasgacuAfcUfGfGfagcaccguuuL96 | 442 | asAfsacgGfuGfCfuccaGfuAfgucuususc | 443 | GAAAGACUACUGGAGCACCGUUA | 444 |
| AD-959879.1 | usgsgcuuCfaGfUfUfcccugaaaguL96 | 445 | asCfsuuuCfaGfGfgaacUfgAfagccasusc | 446 | GAUGGCUUCAGUUCCCUGAAAGA | 447 |
| AD-960091.1 | gscscuccCfaAfUfAfaagcuggacuL96 | 448 | asGfsuccAfgCfUfuuauUfgGfgaggcscsa | 449 | UGGCCUCCCAAUAAAGCUGGACA | 450 |
| AD-959921.1 | asgsuuccCfuGfAfAfagacuacuguL96 | 451 | asCfsaguAfgUfCfuuucAfgGfgaacusgsa | 452 | UCAGUUCCCUGAAAGACUACUGG | 453 |
| AD-960102.1 | asasgcugGfaCfAfAfgaagcugcuuL96 | 454 | asAfsgcaGfcUfUfcuugUfcCfagcuususa | 455 | UAAAGCUGGACAAGAAGCUGCUA | 456 |
| AD-80793.6 | gscsuggaCfaAfGfAfagcugcuauaL96 | 457 | usAfsuagCfaGfCfuucuUfgUfccagcsusu | 458 | GCUGGACAAGAAGCUGCUAUAUA | 459 |
| AD-959925.1 | cscscugaAfaGfAfCfuacuggagcuL96 | 460 | asGfscucCfaGfUfagucUfuUfcagggsasa | 461 | UUCCCUGAAAGACUACUGGAGCA | 462 |
| AD-960098.1 | asasuaaaGfcUfGfGfacaagaagcuL96 | 463 | asGfscuuCfuUfGfuccaGfcUfuuauusgsg | 464 | CCAAUAAAGCUGGACAAGAAGCU | 465 |
| AD-959901.1 | gsgscuggGfuGfAfCfcgauggcuuuL96 | 466 | asAfsagcCfaUfCfggucAfcCfcagccscsc | 467 | GGGGCUGGGUGACCGAUGGCUUC | 468 |
| AD-959920.1 | csasguucCfcUfGfAfaagacuacuuL96 | 469 | asAfsguaGfuCfUfuucaGfgGfaacugsasa | 470 | UUCAGUUCCCUGAAAGACUACUG | 471 |
| AD-959926.1 | cscsugaaAfgAfCfUfacuggagcauL96 | 472 | asUfsgcuCfcAfGfuaguCfuUfucaggsgsa | 473 | UCCCUGAAAGACUACUGGAGCAC | 474 |
| AD-959737.1 | csasucccUfaGfAfGfgcagcugcuuL96 | 475 | asAfsgcaGfcUfGfccucUfaGfggaugsasa | 476 | UUCAUCCCUAGAGGCAGCUGCUC | 477 |
| AD-960011.1 | csusgccuGfaGfAfCfcucaauaccuL96 | 478 | asGfsguaUfuGfAfggucUfcAfggcagscsc | 479 | GGCUGCCUGAGACCUCAAUACCC | 480 |
| AD-960101.1 | asasagcuGfgAfCfAfagaagcugcuL96 | 481 | asGfscagCfuUfCfuuguCfcAfgcuuusasu | 482 | AUAAAGCUGGACAAGAAGCUGCU | 483 |
| AD-959923.1 | ususcccuGfaAfAfGfacuacuggauL96 | 484 | asUfsccaGfuAfGfucuuUfcAfgggaascsu | 485 | AGUUCCCUGAAAGACUACUGGAG | 486 |
| AD-960058.1 | usasgguuGfcUfUfAfaaagggacauL96 | 487 | asUfsgucCfcUfUfuuaaGfcAfaccuascsa | 488 | UGUAGGUUGCUUAAAAGGGACAG | 489 |
| AD-959860.1 | csasccaaGfaCfCfGfccaaggauguL96 | 490 | asCfsaucCfuUfGfgcggUfcUfuggugsgsc | 491 | GCCACCAAGACCGCCAAGGAUGC | 492 |
| AD-960059.1 | asgsguugCfuUfAfAfaagggacaguL96 | 493 | asCfsuguCfcCfUfuuuaAfgCfaaccusasc | 494 | GUAGGUUGCUUAAAAGGGACAGU | 495 |
| AD-960103.1 | asgscuggAfcAfAfGfaagcugcuauL96 | 496 | asUfsagcAfgCfUfucuuGfuCfcagcususu | 497 | AAAGCUGGACAAGAAGCUGCUAU | 498 |
| AD-959740.1 | cscscuagAfgGfCfAfgcugcuccauL96 | 499 | asUfsggaGfcAfGfcugcCfuCfuagggsasu | 500 | AUCCCUAGAGGCAGCUGCUCCAG | 501 |
| AD-959939.1 | usgsgagcAfcCfGfUfuaaggacaauL96 | 502 | asUfsuguCfcUfUfaacgGfuGfcuccasgsu | 503 | ACUGGAGCACCGUUAAGGACAAG | 504 |
| AD-959865.1 | gsasccgcCfaAfGfGfaugcacugauL96 | 505 | asUfscagUfgCfAfuccuUfgGfcggucsusu | 506 | AAGACCGCCAAGGAUGCACUGAG | 507 |
| AD-960100.1 | usasaagcUfgGfAfCfaagaagcuguL96 | 508 | asCfsagcUfuCfUfugucCfaGfcuuuasusu | 509 | AAUAAAGCUGGACAAGAAGCUGC | 510 |
| AD-959924.1 | uscsccugAfaAfGfAfcuacuggaguL96 | 511 | asCfsuccAfgUfAfgucuUfuCfagggasasc | 512 | GUUCCCUGAAAGACUACUGGAGC | 513 |
| AD-959909.1 | gsasccgaUfgGfCfUfucaguucccuL96 | 514 | asGfsggaAfcUfGfaagcCfaUfcggucsasc | 515 | GUGACCGAUGGCUUCAGUUCCCU | 516 |
| AD-959739.1 | uscsccuaGfaGfGfCfagcugcuccuL96 | 517 | asGfsgagCfaGfCfugccUfcUfagggasusg | 518 | CAUCCCUAGAGGCAGCUGCUCCA | 519 |
| AD-959911.1 | cscsgaugGfcUfUfCfaguucccuguL96 | 520 | asCfsaggGfaAfCfugaaGfcCfaucggsusc | 521 | GACCGAUGGCUUCAGUUCCCUGA | 522 |
| AD-960057.1 | gsusagguUfgCfUfUfaaaagggacuL96 | 523 | asGfsuccCfuUfUfuaagCfaAfccuacsasg | 524 | CUGUAGGUUGCUUAAAAGGGACA | 525 |
| AD-959741.1 | cscsuagaGfgCfAfGfcugcuccaguL96 | 526 | asCfsuggAfgCfAfgcugCfcUfcuaggsgsa | 527 | UCCCUAGAGGCAGCUGCUCCAGG | 528 |
| AD-960056.1 | usgsuaggUfuGfCfUfuaaaagggauL96 | 529 | asUfscccUfuUfUfaagcAfaCfcuacasgsg | 530 | CCUGUAGGUUGCUUAAAAGGGAC | 531 |
| AD-959930.1 | asasagacUfaCfUfGfgagcaccguuL96 | 532 | asAfscggUfgCfUfccagUfaGfucuuuscsa | 533 | UGAAAGACUACUGGAGCACCGUU | 534 |
| AD-959746.1 | asgsgcagCfuGfCfUfccaggaacauL96 | 535 | asUfsguuCfcUfGfgagcAfgCfugccuscsu | 536 | AGAGGCAGCUGCUCCAGGAACAG | 537 |
| AD-959748.1 | gscsagcuGfcUfCfCfaggaacagauL96 | 538 | asUfscugUfuCfCfuggaGfcAfgcugcscsu | 539 | AGGCAGCUGCUCCAGGAACAGAG | 540 |
| AD-959857.1 | csgsccacCfaAfGfAfccgccaagguL96 | 541 | asCfscuuGfgCfGfgucuUfgGfuggcgsusg | 542 | CACGCCACCAAGACCGCCAAGGA | 543 |
| AD-959935.1 | csusacugGfaGfCfAfccguuaagguL96 | 544 | asCfscuuAfaCfGfgugcUfcCfaguagsusc | 545 | GACUACUGGAGCACCGUUAAGGA | 546 |
| AD-960008.1 | usgsgcugCfcUfGfAfgaccucaauuL96 | 547 | asAfsuugAfgGfUfcucaGfgCfagccascsg | 548 | CGUGGCUGCCUGAGACCUCAAUA | 549 |
| AD-959915.1 | gsgscuucAfgUfUfCfccugaaagauL96 | 550 | asUfscuuUfcAfGfggaaCfuGfaagccsasu | 551 | AUGGCUUCAGUUCCCUGAAAGAC | 552 |
| AD-959738.1 | asuscccuAfgAfGfGfcagcugcucuL96 | 553 | asGfsagcAfgCfUfgccuCfuAfgggausgsa | 554 | UCAUCCCUAGAGGCAGCUGCUCC | 555 |
| AD-959928.1 | usgsaaagAfcUfAfCfuggagcaccuL96 | 556 | asGfsgugCfuCfCfaguaGfuCfuuucasgsg | 557 | CCUGAAAGACUACUGGAGCACCG | 558 |
| AD-959863.1 | asasgaccGfcCfAfAfggaugcacuuL96 | 559 | asAfsgugCfaUfCfcuugGfcGfgucuusgsg | 560 | CCAAGACCGCCAAGGAUGCACUG | 561 |
| AD-960010.1 | gscsugccUfgAfGfAfccucaauacuL96 | 562 | asGfsuauUfgAfGfgucuCfaGfgcagcscsa | 563 | UGGCUGCCUGAGACCUCAAUACC | 564 |
| AD-960090.1 | gsgsccucCfcAfAfUfaaagcuggauL96 | 565 | asUfsccaGfcUfUfuauuGfgGfaggccsasg | 566 | CUGGCCUCCCAAUAAAGCUGGAC | 567 |
| AD-959732.1 | csasguucAfuCfCfCfuagaggcaguL96 | 568 | asCfsugcCfuCfUfagggAfuGfaacugsasg | 569 | CUCAGUUCAUCCCUAGAGGCAGC | 570 |
| AD-960009.1 | gsgscugcCfuGfAfGfaccucaauauL96 | 571 | asUfsauuGfaGfGfucucAfgGfcagccsasc | 572 | GUGGCUGCCUGAGACCUCAAUAC | 573 |
| AD-959929.1 | gsasaagaCfuAfCfUfggagcaccguL96 | 574 | asCfsgguGfcUfCfcaguAfgUfcuuucsasg | 575 | CUGAAAGACUACUGGAGCACCGU | 576 |
| AD-959745.1 | gsasggcaGfcUfGfCfuccaggaacuL96 | 577 | asGfsuucCfuGfGfagcaGfcUfgccucsusa | 578 | UAGAGGCAGCUGCUCCAGGAACA | 579 |
| AD-960007.1 | gsusggcuGfcCfUfGfagaccucaauL96 | 580 | asUfsugaGfgUfCfucagGfcAfgccacsgsg | 581 | CCGUGGCUGCCUGAGACCUCAAU | 582 |
| AD-959902.1 | gscsugggUfgAfCfCfgauggcuucuL96 | 583 | asGfsaagCfcAfUfcgguCfaCfccagcscsc | 584 | GGGCUGGGUGACCGAUGGCUUCA | 585 |
| AD-959940.1 | gsgsagcaCfcGfUfUfaaggacaaguL96 | 586 | asCfsuugUfcCfUfuaacGfgUfgcuccsasg | 587 | CUGGAGCACCGUUAAGGACAAGU | 588 |
| AD-960055.1 | csusguagGfuUfGfCfuuaaaaggguL96 | 589 | asCfsccuUfuUfAfagcaAfcCfuacagsgsg | 590 | CCCUGUAGGUUGCUUAAAAGGGA | 591 |
| AD-959922.1 | gsusucccUfgAfAfAfgacuacugguL96 | 592 | asCfscagUfaGfUfcuuuCfaGfggaacsusg | 593 | CAGUUCCCUGAAAGACUACUGGA | 594 |
| AD-959900.1 | gsgsgcugGfgUfGfAfccgauggcuuL96 | 595 | asAfsgccAfuCfGfgucaCfcCfagcccscsu | 596 | AGGGGCUGGGUGACCGAUGGCUU | 597 |
| AD-959858.1 | gscscaccAfaGfAfCfcgccaaggauL96 | 598 | asUfsccuUfgGfCfggucUfuGfguggcsgsu | 599 | ACGCCACCAAGACCGCCAAGGAU | 600 |
| AD-959744.1 | asgsaggcAfgCfUfGfcuccaggaauL96 | 601 | asUfsuccUfgGfAfgcagCfuGfccucusasg | 602 | CUAGAGGCAGCUGCUCCAGGAAC | 603 |
| AD-959736.1 | uscsauccCfuAfGfAfggcagcugcuL96 | 604 | asGfscagCfuGfCfcucuAfgGfgaugasasc | 605 | GUUCAUCCCUAGAGGCAGCUGCU | 606 |
| AD-959735.1 | ususcaucCfcUfAfGfaggcagcuguL96 | 607 | asCfsagcUfgCfCfucuaGfgGfaugaascsu | 608 | AGUUCAUCCCUAGAGGCAGCUGC | 609 |
| AD-960039.1 | csgsagcuCfcUfUfGfgguccugcauL96 | 610 | asUfsgcaGfgAfCfccaaGfgAfgcucgscsa | 611 | UGCGAGCUCCUUGGGUCCUGCAA | 612 |
| AD-959747.1 | gsgscagcUfgCfUfCfcaggaacaguL96 | 613 | asCfsuguUfcCfUfggagCfaGfcugccsusc | 614 | GAGGCAGCUGCUCCAGGAACAGA | 615 |
| AD-959862.1 | cscsaagaCfcGfCfCfaaggaugcauL96 | 616 | asUfsgcaUfcCfUfuggcGfgUfcuuggsusg | 617 | CACCAAGACCGCCAAGGAUGCAC | 618 |
| AD-959933.1 | gsascuacUfgGfAfGfcaccguuaauL96 | 619 | asUfsuaaCfgGfUfgcucCfaGfuagucsusu | 620 | AAGACUACUGGAGCACCGUUAAG | 621 |
| AD-959733.1 | asgsuucaUfcCfCfUfagaggcagcuL96 | 622 | asGfscugCfcUfCfuaggGfaUfgaacusgsa | 623 | UCAGUUCAUCCCUAGAGGCAGCU | 624 |
| AD-959937.1 | ascsuggaGfcAfCfCfguuaaggacuL96 | 625 | asGfsuccUfuAfAfcgguGfcUfccagusasg | 626 | CUACUGGAGCACCGUUAAGGACA | 627 |
| AD-959904.1 | usgsggugAfcCfGfAfuggcuucaguL96 | 628 | asCfsugaAfgCfCfaucgGfuCfacccasgsc | 629 | GCUGGGUGACCGAUGGCUUCAGU | 630 |
| AD-959797.1 | cscsgagcUfuCfAfGfaggccgagguL96 | 631 | asCfscucGfgCfCfucugAfaGfcucggsgsc | 632 | GCCCGAGCUUCAGAGGCCGAGGA | 633 |
| AD-959861.1 | ascscaagAfcCfGfCfcaaggaugcuL96 | 634 | asGfscauCfcUfUfggcgGfuCfuuggusgsg | 635 | CCACCAAGACCGCCAAGGAUGCA | 636 |
| AD-959743.1 | usasgaggCfaGfCfUfgcuccaggauL96 | 637 | asUfsccuGfgAfGfcagcUfgCfcucuasgsg | 638 | CCUAGAGGCAGCUGCUCCAGGAA | 639 |
| AD-959905.1 | gsgsgugaCfcGfAfUfggcuucaguuL96 | 640 | asAfscugAfaGfCfcaucGfgUfcacccsasg | 641 | CUGGGUGACCGAUGGCUUCAGUU | 642 |
| AD-959734.1 | gsusucauCfcCfUfAfgaggcagcuuL96 | 643 | asAfsgcuGfcCfUfcuagGfgAfugaacsusg | 644 | CAGUUCAUCCCUAGAGGCAGCUG | 645 |
| AD-959934.1 | ascsuacuGfgAfGfCfaccguuaaguL96 | 646 | asCfsuuaAfcGfGfugcuCfcAfguaguscsu | 647 | AGACUACUGGAGCACCGUUAAGG | 648 |
| AD-959749.1 | csasgcugCfuCfCfAfggaacagaguL96 | 649 | asCfsucuGfuUfCfcuggAfgCfagcugscsc | 650 | GGCAGCUGCUCCAGGAACAGAGG | 651 |
| AD-959798.1 | csgsagcuUfcAfGfAfggccgaggauL96 | 652 | asUfsccuCfgGfCfcucuGfaAfgcucgsgsg | 653 | CCCGAGCUUCAGAGGCCGAGGAU | 654 |
| AD-959742.1 | csusagagGfcAfGfCfugcuccagguL96 | 655 | asCfscugGfaGfCfagcuGfcCfucuagsgsg | 656 | CCCUAGAGGCAGCUGCUCCAGGA | 657 |
| AD-959897.1 | gsasguccCfaGfGfUfggcccagcauL96 | 658 | asUfsgcuGfgGfCfcaccUfgGfgacucscsu | 659 | AGGAGUCCCAGGUGGCCCAGCAG | 660 |
| AD-959864.1 | asgsaccgCfcAfAfGfgaugcacuguL96 | 661 | asCfsaguGfcAfUfccuuGfgCfggucususg | 662 | CAAGACCGCCAAGGAUGCACUGA | 663 |
| AD-959899.1 | cscsagguGfgCfCfCfagcaggccauL96 | 664 | asUfsggcCfuGfCfugggCfcAfccuggsgsa | 665 | UCCCAGGUGGCCCAGCAGGCCAG | 666 |
| AD-959856.1 | ascsgccaCfcAfAfGfaccgccaaguL96 | 667 | asCfsuugGfcGfGfucuuGfgUfggcgusgsc | 668 | GCACGCCACCAAGACCGCCAAGG | 669 |
| AD-959906.1 | gsgsugacCfgAfUfGfgcuucaguuuL96 | 670 | asAfsacuGfaAfGfccauCfgGfucaccscsa | 671 | UGGGUGACCGAUGGCUUCAGUUC | 672 |
| AD-959936.1 | usascuggAfgCfAfCfcguuaaggauL96 | 673 | asUfsccuUfaAfCfggugCfuCfcaguasgsu | 674 | ACUACUGGAGCACCGUUAAGGAC | 675 |
| AD-959896.1 | gsgsagucCfcAfGfGfuggcccagcuL96 | 676 | asGfscugGfgCfCfaccuGfgGfacuccsusg | 677 | CAGGAGUCCCAGGUGGCCCAGCA | 678 |
| AD-959893.1 | gscsaggaGfuCfCfCfagguggcccuL96 | 679 | asGfsggcCfaCfCfugggAfcUfccugcsasc | 680 | GUGCAGGAGUCCCAGGUGGCCCA | 681 |
| AD-959892.1 | usgscaggAfgUfCfCfcagguggccuL96 | 682 | asGfsgccAfcCfUfgggaCfuCfcugcascsg | 683 | CGUGCAGGAGUCCCAGGUGGCCC | 684 |
| AD-959894.1 | csasggagUfcCfCfAfgguggcccauL96 | 685 | asUfsgggCfcAfCfcuggGfaCfuccugscsa | 686 | UGCAGGAGUCCCAGGUGGCCCAG | 687 |
| AD-959750.1 | asgscugcUfcCfAfGfgaacagagguL96 | 688 | asCfscucUfgUfUfccugGfaGfcagcusgsc | 689 | GCAGCUGCUCCAGGAACAGAGGU | 690 |
| AD-959898.1 | asgsucccAfgGfUfGfgcccagcaguL96 | 691 | asCfsugcUfgGfGfccacCfuGfggacuscsc | 692 | GGAGUCCCAGGUGGCCCAGCAGG | 693 |
| AD-959895.1 | asgsgaguCfcCfAfGfguggcccaguL96 | 694 | asCfsuggGfcCfAfccugGfgAfcuccusgsc | 695 | GCAGGAGUCCCAGGUGGCCCAGC | 696 |

TABLE 4
Unmodified Sense and Antisense Strand Sequences of Apolipoprotein C3 dsRNA Agents

| | | SEQ | | | SEQ | |
|---|---|---|---|---|---|---|
| | Sense | ID | Range in | Antisense | ID | Range in |
| Duplex Name | Sequence 5′ to 3′ | NO: | NM_000040.3 | Sequence 5′ to 3′ | NO: | NM_000040.3 |
| AD-960293.1 | CUUCAGUUCCCUGAAAGACUU | 24 | 245-265 | AAGUCUTUCAGGGAACUGAAGCC | 261 | 243-265 |
| AD-960288.1 | GAUGGCUUCAGUUCCCUGAAU | 44 | 240-260 | AUUCAGGGAACUGAAGCCAUCGG | 45 | 238-260 |
| AD-960445.1 | AAGGGACAGUAUUCUCAGUGU | 46 | 437-457 | ACACUGAGAAUACUGUCCCUUUU | 47 | 435-457 |
| AD-960292.1 | GCUUCAGUUCCCUGAAAGACU | 42 | 244-264 | AGUCUUTCAGGGAACUGAAGCCA | 262 | 242-264 |
| AD-960475.1 | CCAAUAAAGCUGGACAAGAAU | 28 | 506-526 | AUUCUUGUCCAGCUUUAUUGGGA | 29 | 504-526 |
| AD-960442.1 | UAAAAGGGACAGUAUUCUCAU | 36 | 434-454 | AUGAGAAUACUGUCCCUUUUAAG | 37 | 432-454 |
| AD-960470.1 | GCCUCCCAAUAAAGCUGGACU | 95 | 501-521 | AGUCCAGCUUUAUUGGGAGGCCA | 96 | 499-521 |
| AD-960436.1 | GUUGCUUAAAAGGGACAGUAU | 263 | 428-448 | AUACUGTCCCUUUUAAGCAACCU | 264 | 426-448 |
| AD-960446.1 | AGGGACAGUAUUCUCAGUGCU | 85 | 438-458 | AGCACUGAGAAUACUGUCCCUUU | 86 | 436-458 |
| AD-960474.1 | CCCAAUAAAGCUGGACAAGAU | 59 | 505-525 | AUCUUGTCCAGCUUUAUUGGGAG | 265 | 503-525 |
| AD-960294.1 | UUCAGUUCCCUGAAAGACUAU | 26 | 246-266 | AUAGUCTUUCAGGGAACUGAAGC | 266 | 244-266 |
| AD-960471.1 | CCUCCCAAUAAAGCUGGACAU | 54 | 502-522 | AUGUCCAGCUUUAUUGGGAGGCC | 55 | 500-522 |
| AD-960314.1 | CUGGAGCACCGUUAAGGACAU | 61 | 266-286 | AUGUCCTUAACGGUGCUCCAGUA | 267 | 264-286 |
| AD-960443.1 | AAAAGGGACAGUAUUCUCAGU | 30 | 435-455 | ACUGAGAAUACUGUCCCUUUUAA | 31 | 433-455 |
| AD-960282.1 | GUGACCGAUGGCUUCAGUUCU | 65 | 234-254 | AGAACUGAAGCCAUCGGUCACCC | 66 | 232-254 |
| AD-960283.1 | UGACCGAUGGCUUCAGUUCCU | 77 | 235-255 | AGGAACTGAAGCCAUCGGUCACC | 268 | 233-255 |
| AD-80794.7 | CUUAAAAGGGACAGUAUUCUA | 13 | 432-450 | UAGAAUACUGUCCCUUUUAAGCA | 58 | 430-450 |
| AD-960295.1 | UCAGUUCCCUGAAAGACUACU | 71 | 247-267 | AGUAGUCUUUCAGGGAACUGAAG | 72 | 245-267 |
| AD-960478.1 | AUAAAGCUGGACAAGAAGCUU | 89 | 509-529 | AAGCUUCUUGUCCAGCUUUAUUG | 90 | 507-529 |
| AD-960289.1 | AUGGCUUCAGUUCCCUGAAAU | 32 | 241-261 | AUUUCAGGGAACUGAAGCCAUCG | 33 | 239-261 |
| AD-960481.1 | AAGCUGGACAAGAAGCUGCUU | 99 | 512-532 | AAGCAGCUUCUUGUCCAGCUUUA | 100 | 510-532 |
| AD-960318.1 | AGCACCGUUAAGGACAAGUUU | 34 | 270-290 | AAACUUGUCCUUAACGGUGCUCC | 35 | 268-290 |
| AD-960297.1 | AGUUCCCUGAAAGACUACUGU | 97 | 249-269 | ACAGUAGUCUUUCAGGGAACUGA | 98 | 247-269 |
| AD-960477.1 | AAUAAAGCUGGACAAGAAGCU | 105 | 508-528 | AGCUUCTUGUCCAGCUUUAUUGG | 269 | 506-528 |
| AD-960317.1 | GAGCACCGUUAAGGACAAGUU | 270 | 269-289 | AACUUGTCCUUAACGGUGCUCCA | 271 | 267-289 |
| AD-960476.1 | CAAUAAAGCUGGACAAGAAGU | 81 | 507-527 | ACUUCUTGUCCAGCUUUAUUGGG | 272 | 505-527 |
| AD-960241.1 | GACCGCCAAGGAUGCACUGAU | 133 | 170-190 | AUCAGUGCAUCCUUGGCGGUCUU | 134 | 168-190 |
| AD-960480.1 | AAAGCUGGACAAGAAGCUGCU | 117 | 511-531 | AGCAGCTUCUUGUCCAGCUUUAU | 273 | 509-531 |
| AD-960482.1 | AGCUGGACAAGAAGCUGCUAU | 127 | 513-533 | AUAGCAGCUUCUUGUCCAGCUUU | 128 | 511-533 |
| AD-80793.7 | GCUGGACAAGAAGCUGCUAUA | 101 | 514-533 | UAUAGCAGCUUCUUGUCCAGCUU | 102 | 512-533 |
| AD-960107.1 | CAGUUCAUCCCUAGAGGCAGU | 175 | 6-26 | ACUGCCTCUAGGGAUGAACUGAG | 274 | 6-26 |
| AD-960308.1 | AGACUACUGGAGCACCGUUAU | 73 | 260-280 | AUAACGGUGCUCCAGUAGUCUUU | 74 | 258-280 |
| AD-960121.1 | AGGCAGCUGCUCCAGGAACAU | 153 | 20-40 | AUGUUCCUGGAGCAGCUGCCUCU | 154 | 18-40 |
| AD-960287.1 | CGAUGGCUUCAGUUCCCUGAU | 83 | 239-259 | AUCAGGGAACUGAAGCCAUCGGU | 84 | 237-259 |
| AD-960473.1 | UCCCAAUAAAGCUGGACAAGU | 67 | 504-524 | ACUUGUCCAGCUUUAUUGGGAGG | 68 | 502-524 |
| AD-960479.1 | UAAAGCUGGACAAGAAGCUGU | 135 | 510-530 | ACAGCUTCUUGUCCAGCUUUAUU | 275 | 508-530 |
| AD-960278.1 | CUGGGUGACCGAUGGCUUCAU | 79 | 230-250 | AUGAAGCCAUCGGUCACCCAGCC | 80 | 228-250 |
| AD-960113.1 | AUCCCUAGAGGCAGCUGCUCU | 165 | 12-32 | AGAGCAGCUGCCUCUAGGGAUGA | 166 | 10-32 |
| AD-960472.1 | CUCCCAAUAAAGCUGGACAAU | 50 | 503-523 | AUUGUCCAGCUUUAUUGGGAGGC | 51 | 501-523 |
| AD-960444.1 | AAAGGGACAGUAUUCUCAGUU | 63 | 436-456 | AACUGAGAAUACUGUCCCUUUUA | 64 | 434-456 |
| AD-960303.1 | CUGAAAGACUACUGGAGCACU | 87 | 255-275 | AGUGCUCCAGUAGUCUUUCAGGG | 88 | 253-275 |
| AD-960438.1 | UGCUUAAAAGGGACAGUAUUU | 52 | 430-450 | AAAUACTGUCCCUUUUAAGCAAC | 276 | 428-450 |
| AD-960290.1 | UGGCUUCAGUUCCCUGAAAGU | 93 | 242-262 | ACUUUCAGGGAACUGAAGCCAUC | 94 | 240-262 |
| AD-960304.1 | UGAAAGACUACUGGAGCACCU | 167 | 256-276 | AGGUGCTCCAGUAGUCUUUCAGG | 277 | 254-276 |
| AD-960388.1 | CUGCCUGAGACCUCAAUACCU | 115 | 340-360 | AGGUAUTGAGGUCUCAGGCAGCC | 278 | 338-360 |
| AD-960233.1 | GCCACCAAGACCGCCAAGGAU | 195 | 162-182 | AUCCUUGGCGGUCUUGGUGGCGU | 196 | 160-182 |
| AD-960234.1 | CCACCAAGACCGCCAAGGAUU | 75 | 163-183 | AAUCCUTGGCGGUCUUGGUGGCG | 279 | 161-183 |
| AD-960114.1 | UCCCUAGAGGCAGCUGCUCCU | 141 | 13-33 | AGGAGCAGCUGCCUCUAGGGAUG | 142 | 11-33 |
| AD-960296.1 | CAGUUCCCUGAAAGACUACUU | 109 | 248-268 | AAGUAGTCUUUCAGGGAACUGAA | 280 | 246-268 |
| AD-960431.1 | UGUAGGUUGCUUAAAAGGGAU | 149 | 423-443 | AUCCCUTUUAAGCAACCUACAGG | 281 | 421-443 |
| AD-960316.1 | GGAGCACCGUUAAGGACAAGU | 187 | 268-288 | ACUUGUCCUUAACGGUGCUCCAG | 188 | 266-288 |
| AD-960307.1 | AAGACUACUGGAGCACCGUUU | 91 | 259-279 | AAACGGTGCUCCAGUAGUCUUUC | 282 | 257-279 |
| AD-960120.1 | GAGGCAGCUGCUCCAGGAACU | 181 | 19-39 | AGUUCCTGGAGCAGCUGCCUCUA | 283 | 17-39 |
| AD-960238.1 | CAAGACCGCCAAGGAUGCACU | 284 | 167-187 | AGUGCATCCUUGGCGGUCUUGGU | 285 | 165-187 |
| AD-960301.1 | CCCUGAAAGACUACUGGAGCU | 103 | 253-273 | AGCUCCAGUAGUCUUUCAGGGAA | 104 | 251-273 |
| AD-960235.1 | CACCAAGACCGCCAAGGAUGU | 123 | 164-184 | ACAUCCTUGGCGGUCUUGGUGGC | 286 | 162-184 |
| AD-960123.1 | GCAGCUGCUCCAGGAACAGAU | 155 | 22-42 | AUCUGUTCCUGGAGCAGCUGCCU | 287 | 20-42 |
| AD-960300.1 | UCCCUGAAAGACUACUGGAGU | 137 | 252-272 | ACUCCAGUAGUCUUUCAGGGAAC | 138 | 250-272 |
| AD-960285.1 | ACCGAUGGCUUCAGUUCCCUU | 38 | 237-257 | AAGGGAACUGAAGCCAUCGGUCA | 39 | 235-257 |
| AD-960469.1 | GGCCUCCCAAUAAAGCUGGAU | 173 | 500-520 | AUCCAGCUUUAUUGGGAGGCCAG | 174 | 498-520 |
| AD-960387.1 | GCUGCCUGAGACCUCAAUACU | 171 | 339-359 | AGUAUUGAGGUCUCAGGCAGCCA | 172 | 337-359 |
| AD-960384.1 | GUGGCUGCCUGAGACCUCAAU | 183 | 336-356 | AUUGAGGUCUCAGGCAGCCACGG | 184 | 334-356 |
| AD-960109.1 | GUUCAUCCCUAGAGGCAGCUU | 225 | 10-28 | AAGCUGCCUCUAGGGAUGAACUG | 226 | 6-28 |
| AD-960112.1 | CAUCCCUAGAGGCAGCUGCUU | 113 | 11-31 | AAGCAGCUGCCUCUAGGGAUGAA | 114 | 9-31 |
| AD-960386.1 | GGCUGCCUGAGACCUCAAUAU | 177 | 338-358 | AUAUUGAGGUCUCAGGCAGCCAC | 178 | 336-358 |
| AD-960302.1 | CCUGAAAGACUACUGGAGCAU | 111 | 254-274 | AUGCUCCAGUAGUCUUUCAGGGA | 112 | 252-274 |
| AD-960118.1 | UAGAGGCAGCUGCUCCAGGAU | 221 | 17-37 | AUCCUGGAGCAGCUGCCUCUAGG | 222 | 15-37 |
| AD-960111.1 | UCAUCCCUAGAGGCAGCUGCU | 199 | 10-30 | AGCAGCTGCCUCUAGGGAUGAAC | 288 | 8-30 |
| AD-960299.1 | UUCCCUGAAAGACUACUGGAU | 119 | 251-271 | AUCCAGTAGUCUUUCAGGGAACU | 289 | 249-271 |
| AD-960115.1 | CCCUAGAGGCAGCUGCUCCAU | 129 | 14-34 | AUGGAGCAGCUGCCUCUAGGGAU | 130 | 12-34 |
| AD-960439.1 | GCUUAAAAGGGACAGUAUUCU | 56 | 431-451 | AGAAUACUGUCCCUUUUAAGCAA | 57 | 429-451 |
| AD-960441.1 | UUAAAAGGGACAGUAUUCUCU | 40 | 433-453 | AGAGAATACUGUCCCUUUUAAGC | 290 | 431-453 |
| AD-960232.1 | CGCCACCAAGACCGCCAAGGU | 157 | 161-181 | ACCUUGGCGGUCUUGGUGGCGUG | 158 | 159-181 |
| AD-960276.1 | GGCUGGGUGACCGAUGGCUUU | 107 | 228-248 | AAAGCCAUCGGUCACCCAGCCCC | 108 | 226-248 |
| AD-960435.1 | GGUUGCUUAAAAGGGACAGUU | 69 | 427-447 | AACUGUCCCUUUUAAGCAACCUA | 70 | 425-447 |
| AD-960306.1 | AAAGACUACUGGAGCACCGUU | 151 | 258-278 | AACGGUGCUCCAGUAGUCUUUCA | 152 | 256-278 |
| AD-960172.1 | CCGAGCUUCAGAGGCCGAGGU | 217 | 101-121 | ACCUCGGCCUCUGAAGCUCGGGC | 218 | 99-121 |
| AD-960385.1 | UGGCUGCCUGAGACCUCAAUU | 161 | 337-357 | AAUUGAGGUCUCAGGCAGCCACG | 162 | 335-357 |
| AD-960110.1 | UUCAUCCCUAGAGGCAGCUGU | 201 | 9-29 | ACAGCUGCCUCUAGGGAUGAACU | 202 | 7-29 |
| AD-960116.1 | CCUAGAGGCAGCUGCUCCAGU | 147 | 15-35 | ACUGGAGCAGCUGCCUCUAGGGA | 148 | 13-35 |
| AD-960434.1 | AGGUUGCUUAAAAGGGACAGU | 125 | 426-446 | ACUGUCCCUUUUAAGCAACCUAC | 126 | 424-446 |
| AD-960430.1 | CUGUAGGUUGCUUAAAAGGGU | 189 | 422-442 | ACCCUUTUAAGCAACCUACAGGG | 291 | 420-442 |
| AD-960305.1 | GAAAGACUACUGGAGCACCGU | 179 | 257-277 | ACGGUGCUCCAGUAGUCUUUCAG | 180 | 255-277 |
| AD-960279.1 | UGGGUGACCGAUGGCUUCAGU | 215 | 231-251 | ACUGAAGCCAUCGGUCACCCAGC | 216 | 229-251 |
| AD-960298.1 | GUUCCCUGAAAGACUACUGGU | 191 | 250-270 | ACCAGUAGUCUUUCAGGGAACUG | 192 | 248-270 |
| AD-960284.1 | GACCGAUGGCUUCAGUUCCCU | 139 | 236-256 | AGGGAACUGAAGCCAUCGGUCAC | 140 | 234-256 |
| AD-960313.1 | ACUGGAGCACCGUUAAGGACU | 213 | 265-285 | AGUCCUTAACGGUGCUCCAGUAG | 292 | 263-285 |
| AD-960432.1 | GUAGGUUGCUUAAAAGGGACU | 145 | 424-444 | AGUCCCTUUUAAGCAACCUACAG | 293 | 422-444 |
| AD-960124.1 | CAGCUGCUCCAGGAACAGAGU | 229 | 23-43 | ACUCUGTUCCUGGAGCAGCUGCC | 294 | 21-43 |
| AD-960119.1 | AGAGGCAGCUGCUCCAGGAAU | 197 | 18-38 | AUUCCUGGAGCAGCUGCCUCUAG | 198 | 16-38 |
| AD-960437.1 | UUGCUUAAAAGGGACAGUAUU | 295 | 429-449 | AAUACUGUCCCUUUUAAGCAACC | 296 | 427-449 |
| AD-960315.1 | UGGAGCACCGUUAAGGACAAU | 131 | 267-287 | AUUGUCCUUAACGGUGCUCCAGU | 132 | 265-287 |
| AD-960117.1 | CUAGAGGCAGCUGCUCCAGGU | 233 | 16-36 | ACCUGGAGCAGCUGCCUCUAGGG | 234 | 14-36 |
| AD-960311.1 | CUACUGGAGCACCGUUAAGGU | 159 | 263-283 | ACCUUAACGGUGCUCCAGUAGUC | 160 | 261-283 |
| AD-960272.1 | GAGUCCCAGGUGGCCCAGCAU | 235 | 201-221 | AUGCUGGGCCACCUGGGACUCCU | 236 | 199-221 |
| AD-960414.1 | CGAGCUCCUUGGGUCCUGCAU | 203 | 386-406 | AUGCAGGACCCAAGGAGCUCGCA | 204 | 384-406 |
| AD-960240.1 | AGACCGCCAAGGAUGCACUGU | 237 | 169-189 | ACAGUGCAUCCUUGGCGGUCUUG | 238 | 167-189 |
| AD-960286.1 | CCGAUGGCUUCAGUUCCCUGU | 143 | 238-258 | ACAGGGAACUGAAGCCAUCGGUC | 144 | 236-258 |
| AD-960281.1 | GGUGACCGAUGGCUUCAGUUU | 243 | 233-253 | AAACUGAAGCCAUCGGUCACCCA | 244 | 231-253 |
| AD-960277.1 | GCUGGGUGACCGAUGGCUUCU | 185 | 229-249 | AGAAGCCAUCGGUCACCCAGCCC | 186 | 227-249 |
| AD-960274.1 | CCAGGUGGCCCAGCAGGCCAU | 239 | 206-226 | AUGGCCTGCUGGGCCACCUGGGA | 297 | 204-226 |
| AD-960108.1 | AGUUCAUCCCUAGAGGCAGCU | 211 | 11-27 | AGCUGCCUCUAGGGAUGAACUGA | 212 | 11-27 |
| AD-960239.1 | AAGACCGCCAAGGAUGCACUU | 169 | 168-188 | AAGUGCAUCCUUGGCGGUCUUGG | 170 | 166-188 |
| AD-960122.1 | GGCAGCUGCUCCAGGAACAGU | 205 | 21-41 | ACUGUUCCUGGAGCAGCUGCCUC | 206 | 19-41 |
| AD-960291.1 | GGCUUCAGUUCCCUGAAAGAU | 163 | 243-263 | AUCUUUCAGGGAACUGAAGCCAU | 164 | 241-263 |
| AD-960125.1 | AGCUGCUCCAGGAACAGAGGU | 255 | 24-44 | ACCUCUGUUCCUGGAGCAGCUGC | 256 | 22-44 |
| AD-960231.1 | ACGCCACCAAGACCGCCAAGU | 241 | 160-180 | ACUUGGCGGUCUUGGUGGCGUGC | 242 | 158-180 |
| AD-960275.1 | GGGCUGGGUGACCGAUGGCUU | 193 | 227-247 | AAGCCATCGGUCACCCAGCCCCU | 298 | 225-247 |
| AD-960173.1 | CGAGCUUCAGAGGCCGAGGAU | 231 | 102-122 | AUCCUCGGCCUCUGAAGCUCGGG | 232 | 100-122 |
| AD-960271.1 | GGAGUCCCAGGUGGCCCAGCU | 247 | 200-220 | AGCUGGGCCACCUGGGACUCCUG | 248 | 198-220 |
| AD-960433.1 | UAGGUUGCUUAAAAGGGACAU | 121 | 425-445 | AUGUCCCUUUUAAGCAACCUACA | 122 | 423-445 |
| AD-960267.1 | UGCAGGAGUCCCAGGUGGCCU | 251 | 196-216 | AGGCCACCUGGGACUCCUGCACG | 252 | 194-216 |
| AD-960236.1 | ACCAAGACCGCCAAGGAUGCU | 219 | 165-185 | AGCAUCCUUGGCGGUCUUGGUGG | 220 | 163-185 |
| AD-960310.1 | ACUACUGGAGCACCGUUAAGU | 227 | 262-282 | ACUUAACGGUGCUCCAGUAGUCU | 228 | 260-282 |
| AD-960312.1 | UACUGGAGCACCGUUAAGGAU | 245 | 264-284 | AUCCUUAACGGUGCUCCAGUAGU | 246 | 262-284 |
| AD-960309.1 | GACUACUGGAGCACCGUUAAU | 209 | 261-281 | AUUAACGGUGCUCCAGUAGUCUU | 210 | 259-281 |
| AD-960440.1 | CUUAAAAGGGACAGUAUUCUU | 48 | 432-452 | AAGAAUACUGUCCCUUUUAAGCA | 49 | 430-452 |
| AD-960237.1 | CCAAGACCGCCAAGGAUGCAU | 207 | 166-186 | AUGCAUCCUUGGCGGUCUUGGUG | 208 | 164-186 |
| AD-960268.1 | GCAGGAGUCCCAGGUGGCCCU | 249 | 197-217 | AGGGCCACCUGGGACUCCUGCAC | 250 | 195-217 |
| AD-960269.1 | CAGGAGUCCCAGGUGGCCCAU | 253 | 198-218 | AUGGGCCACCUGGGACUCCUGCA | 254 | 196-218 |
| AD-960280.1 | GGGUGACCGAUGGCUUCAGUU | 223 | 232-252 | AACUGAAGCCAUCGGUCACCCAG | 224 | 230-252 |
| AD-960270.1 | AGGAGUCCCAGGUGGCCCAGU | 259 | 199-219 | ACUGGGCCACCUGGGACUCCUGC | 260 | 197-219 |
| AD-960273.1 | AGUCCCAGGUGGCCCAGCAGU | 257 | 202-222 | ACUGCUGGGCCACCUGGGACUCC | 258 | 200-222 |

TABLE 5
Modified Sense and Antisense Strand Sequences of Apolipoprotein C3 dsRNA Agents

| Duplex Name | Sense Sequence 5′ to 3′ | SEQ ID NO: | Antisense Sequence 5′ to 3′ | SEQ ID NO: | mRNA target sequence | SEQ ID NO: |
|---|---|---|---|---|---|---|
| AD-960293.1 | csusucagUfuCfCfCfugaaagacuuL96 | 341 | asAfsgucu(Tgn)ucagggAfaCfugaagscsc | 697 | GGCUUCAGUUCCCUGAAAGACUA | 343 |
| AD-960288.1 | ususcaguUfcCfCfUfgaaagacuauL96 | 344 | asUfsucag(Ggn)gaacugAfaGfccaucsgsg | 698 | CCGAUGGCUUCAGUUCCCUGAAA | 373 |
| AD-960445.1 | cscsaauaAfaGfCfUfggacaagaauL96 | 347 | asCfsacug(Agn)gaauacUfgUfcccuususu | 699 | AAAAGGGACAGUAUUCUCAGUGC | 376 |
| AD-960292.1 | asasaaggGfaCfAfGfuauucucaguL96 | 350 | asGfsucuu(Tgn)cagggaAfcUfgaagcscsa | 700 | UGGCUUCAGUUCCCUGAAAGACU | 370 |
| AD-960475.1 | asusggcuUfcAfGfUfucccugaaauL96 | 353 | asUfsucuu(Ggn)uccagcUfuUfauuggsgsa | 701 | UCCCAAUAAAGCUGGACAAGAAG | 349 |
| AD-960442.1 | asgscaccGfuUfAfAfggacaaguuuL96 | 356 | asUfsgaga(Agn)uacuguCfcCfuuuuasasg | 702 | CUUAAAAGGGACAGUAUUCUCAG | 361 |
| AD-960470.1 | usasaaagGfgAfCfAfguauucucauL96 | 359 | asGfsucca(Ggn)cuuuauUfgGfgaggcscsa | 703 | UGGCCUCCCAAUAAAGCUGGACA | 450 |
| AD-960436.1 | ascscgauGfgCfUfUfcaguucccuuL96 | 362 | asUfsacug(Tgn)cccuuuUfaAfgcaacscsu | 704 | AGGUUGCUUAAAAGGGACAGUAU | 705 |
| AD-960446.1 | ususaaaaGfgGfAfCfaguauucucuL96 | 365 | asGfscacu(Ggn)agaauaCfuGfucccususu | 706 | AAAGGGACAGUAUUCUCAGUGCU | 435 |
| AD-960474.1 | gscsuucaGfuUfCfCfcugaaagacuL96 | 368 | asUfscuug(Tgn)ccagcuUfuAfuugggsasg | 707 | CUCCCAAUAAAGCUGGACAAGAA | 396 |
| AD-960294.1 | gsasuggcUfuCfAfGfuucccugaauL96 | 371 | asUfsaguc(Tgn)uucaggGfaAfcugaasgsc | 708 | GCUUCAGUUCCCUGAAAGACUAC | 346 |
| AD-960471.1 | asasgggaCfaGfUfAfuucucaguguL96 | 374 | asUfsgucc(Agn)gcuuuaUfuGfggaggscsc | 709 | GGCCUCCCAAUAAAGCUGGACAA | 388 |
| AD-960314.1 | csusuaaaAfgGfGfAfcaguauucuuL96 | 377 | asUfsgucc(Tgn)uaacggUfgCfuccagsusa | 710 | UACUGGAGCACCGUUAAGGACAA | 399 |
| AD-960443.1 | csuscccaAfuAfAfAfgcuggacaauL96 | 380 | asCfsugag(Agn)auacugUfcCfcuuuusasa | 711 | UUAAAAGGGACAGUAUUCUCAGU | 352 |
| AD-960282.1 | usgscuuaAfaAfGfGfgacaguauuuL96 | 383 | asGfsaacu(Ggn)aagccaUfcGfgucacscsc | 712 | GGGUGACCGAUGGCUUCAGUUCC | 405 |
| AD-960283.1 | cscsucccAfaUfAfAfagcuggacauL96 | 386 | asGfsgaac(Tgn)gaagccAfuCfggucascsc | 713 | GGUGACCGAUGGCUUCAGUUCCC | 423 |
| AD-80794.7 | gscsuuaaAfaGfGfGfacaguauucuL96 | 389 | usAfsgaaUfaCfUfguccCfuUfuuaagscsa | 392 | UAGAAUACUGUCCCUUUUAAGCA | 714 |
| AD-960295.1 | csusucagUfuCfCfCfugaaagacuuL96 | 341 | asGfsuagu(Cgn)uuucagGfgAfacugasasg | 715 | CUUCAGUUCCCUGAAAGACUACU | 414 |
| AD-960478.1 | gsasuggcUfuCfAfGfuucccugaauL96 | 371 | asAfsgcuu(Cgn)uuguccAfgCfuuuaususg | 716 | CAAUAAAGCUGGACAAGAAGCUG | 441 |
| AD-960289.1 | asasgggaCfaGfUfAfuucucaguguL96 | 374 | asUfsuuca(Ggn)ggaacuGfaAfgccauscsg | 717 | CGAUGGCUUCAGUUCCCUGAAAG | 355 |
| AD-960481.1 | gscsuucaGfuUfCfCfcugaaagacuL96 | 368 | asAfsgcag(Cgn)uucuugUfcCfagcuususa | 718 | UAAAGCUGGACAAGAAGCUGCUA | 456 |
| AD-960318.1 | cscsaauaAfaGfCfUfggacaagaauL96 | 347 | asAfsacuu(Ggn)uccuuaAfcGfgugcuscsc | 719 | GGAGCACCGUUAAGGACAAGUUC | 358 |
| AD-960297.1 | usasaaagGfgAfCfAfguauucucauL96 | 359 | asCfsagua(Ggn)ucuuucAfgGfgaacusgsa | 720 | UCAGUUCCCUGAAAGACUACUGG | 453 |
| AD-960477.1 | gscscuccCfaAfUfAfaagcuggacuL96 | 448 | asGfscuuc(Tgn)uguccaGfcUfuuauusgsg | 721 | CCAAUAAAGCUGGACAAGAAGCU | 465 |
| AD-960317.1 | gsusugcuUfaAfAfAfgggacaguauL96 | 722 | asAfscuug(Tgn)ccuuaaCfgGfugcucscsa | 723 | UGGAGCACCGUUAAGGACAAGUU | 724 |
| AD-960476.1 | asgsggacAfgUfAfUfucucagugcuL96 | 433 | asCfsuucu(Tgn)guccagCfuUfuauugsgsg | 725 | CCCAAUAAAGCUGGACAAGAAGC | 429 |
| AD-960241.1 | cscscaauAfaAfGfCfuggacaagauL96 | 394 | asUfscagu(Ggn)cauccuUfgGfcggucsusu | 726 | AAGACCGCCAAGGAUGCACUGAG | 507 |
| AD-960480.1 | ususcaguUfcCfCfUfgaaagacuauL96 | 344 | asGfscagc(Tgn)ucuuguCfcAfgcuuusasu | 727 | AUAAAGCUGGACAAGAAGCUGCU | 483 |
| AD-960482.1 | cscsucccAfaUfAfAfagcuggacauL96 | 386 | asUfsagca(Ggn)cuucuuGfuCfcagcususu | 728 | AAAGCUGGACAAGAAGCUGCUAU | 498 |
| AD-80793.7 | csusggagCfaCfCfGfuuaaggacauL96 | 397 | usAfsuagCfaGfCfuucuUfgUfccagcsusu | 458 | UAUAGCAGCUUCUUGUCCAGCUU | 729 |
| AD-960107.1 | asasaaggGfaCfAfGfuauucucaguL96 | 350 | asCfsugcc(Tgn)cuagggAfuGfaacugsasg | 730 | CUCAGUUCAUCCCUAGAGGCAGC | 570 |
| AD-960308.1 | gsusgaccGfaUfGfGfcuucaguucuL96 | 403 | asUfsaacg(Ggn)ugcuccAfgUfagucususu | 731 | AAAGACUACUGGAGCACCGUUAA | 417 |
| AD-960121.1 | usgsaccgAfuGfGfCfuucaguuccuL96 | 421 | asUfsguuc(Cgn)uggagcAfgCfugccuscsu | 732 | AGAGGCAGCUGCUCCAGGAACAG | 537 |
| AD-960287.1 | csusuaaaAfgGfGfAfcaguauucuaL96 | 17 | asUfscagg(Ggn)aacugaAfgCfcaucgsgsu | 733 | ACCGAUGGCUUCAGUUCCCUGAA | 432 |
| AD-960473.1 | uscsaguuCfcCfUfGfaaagacuacuL96 | 412 | asCfsuugu(Cgn)cagcuuUfaUfugggasgsg | 734 | CCUCCCAAUAAAGCUGGACAAGA | 408 |
| AD-960479.1 | asusaaagCfuGfGfAfcaagaagcuuL96 | 439 | asCfsagcu(Tgn)cuugucCfaGfcuuuasusu | 735 | AAUAAAGCUGGACAAGAAGCUGC | 510 |
| AD-960278.1 | asusggcuUfcAfGfUfucccugaaauL96 | 353 | asUfsgaag(Cgn)caucggUfcAfcccagscsc | 736 | GGCUGGGUGACCGAUGGCUUCAG | 426 |
| AD-960113.1 | asasgcugGfaCfAfAfgaagcugcuuL96 | 454 | asGfsagca(Ggn)cugccuCfuAfgggausgsa | 737 | UCAUCCCUAGAGGCAGCUGCUCC | 555 |
| AD-960472.1 | asgscaccGfuUfAfAfggacaaguuuL96 | 356 | asUfsuguc(Cgn)agcuuuAfuUfgggagsgsc | 738 | GCCUCCCAAUAAAGCUGGACAAG | 382 |
| AD-960444.1 | asgsuuccCfuGfAfAfagacuacuguL96 | 451 | asAfscuga(Ggn)aauacuGfuCfccuuususa | 739 | UAAAAGGGACAGUAUUCUCAGUG | 402 |
| AD-960303.1 | asasuaaaGfcUfGfGfacaagaagcuL96 | 463 | asGfsugcu(Cgn)caguagUfcUfuucagsgsg | 740 | CCCUGAAAGACUACUGGAGCACC | 438 |
| AD-960438.1 | gsasgcacCfgUfUfAfaggacaaguuL96 | 741 | asAfsauac(Tgn)gucccuUfuUfaagcasasc | 742 | GUUGCUUAAAAGGGACAGUAUUC | 385 |
| AD-960290.1 | csasauaaAfgCfUfGfgacaagaaguL96 | 427 | asCfsuuuc(Agn)gggaacUfgAfagccasusc | 743 | GAUGGCUUCAGUUCCCUGAAAGA | 447 |
| AD-960304.1 | gsasccgcCfaAfGfGfaugcacugauL96 | 505 | asGfsgugc(Tgn)ccaguaGfuCfuuucasgsg | 744 | CCUGAAAGACUACUGGAGCACCG | 558 |
| AD-960388.1 | asasagcuGfgAfCfAfagaagcugcuL96 | 481 | asGfsguau(Tgn)gaggucUfcAfggcagscsc | 745 | GGCUGCCUGAGACCUCAAUACCC | 480 |
| AD-960233.1 | asgscuggAfcAfAfGfaagcugcuauL96 | 496 | asUfsccuu(Ggn)gcggucUfuGfguggcsgsu | 746 | ACGCCACCAAGACCGCCAAGGAU | 600 |
| AD-960234.1 | gscsuggaCfaAfGfAfagcugcuauaL96 | 457 | asAfsuccu(Tgn)ggcgguCfuUfgguggscsg | 747 | CGCCACCAAGACCGCCAAGGAUG | 420 |
| AD-960114.1 | csasguucAfuCfCfCfuagaggcaguL96 | 568 | asGfsgagc(Agn)gcugccUfcUfagggasusg | 748 | CAUCCCUAGAGGCAGCUGCUCCA | 519 |
| AD-960296.1 | asgsacuaCfuGfGfAfgcaccguuauL96 | 415 | asAfsguag(Tgn)cuuucaGfgGfaacugsasa | 749 | UUCAGUUCCCUGAAAGACUACUG | 471 |
| AD-960431.1 | asgsgcagCfuGfCfUfccaggaacauL96 | 535 | asUfscccu(Tgn)uuaagcAfaCfcuacasgsg | 750 | CCUGUAGGUUGCUUAAAAGGGAC | 531 |
| AD-960316.1 | csgsauggCfuUfCfAfguucccugauL96 | 430 | asCfsuugu(Cgn)cuuaacGfgUfgcuccsasg | 751 | CUGGAGCACCGUUAAGGACAAGU | 588 |
| AD-960307.1 | uscsccaaUfaAfAfGfcuggacaaguL96 | 406 | asAfsacgg(Tgn)gcuccaGfuAfgucuususc | 752 | GAAAGACUACUGGAGCACCGUUA | 444 |
| AD-960120.1 | usasaagcUfgGfAfCfaagaagcuguL96 | 508 | asGfsuucc(Tgn)ggagcaGfcUfgccucsusa | 753 | UAGAGGCAGCUGCUCCAGGAACA | 579 |
| AD-960238.1 | csusggguGfaCfCfGfauggcuucauL96 | 424 | asGfsugca(Tgn)ccuuggCfgGfucuugsgsu | 754 | ACCAAGACCGCCAAGGAUGCACU | 755 |
| AD-960301.1 | asuscccuAfgAfGfGfcagcugcucuL96 | 553 | asGfscucc(Agn)guagucUfuUfcagggsasa | 756 | UUCCCUGAAAGACUACUGGAGCA | 462 |
| AD-960235.1 | csuscccaAfuAfAfAfgcuggacaauL96 | 380 | asCfsaucc(Tgn)uggcggUfcUfuggugsgsc | 757 | GCCACCAAGACCGCCAAGGAUGC | 492 |
| AD-960123.1 | asasagggAfcAfGfUfauucucaguuL96 | 400 | asUfscugu(Tgn)ccuggaGfcAfgcugcscsu | 758 | AGGCAGCUGCUCCAGGAACAGAG | 540 |
| AD-960300.1 | csusgaaaGfaCfUfAfcuggagcacuL96 | 436 | asCfsucca(Ggn)uagucuUfuCfagggasasc | 759 | GUUCCCUGAAAGACUACUGGAGC | 513 |
| AD-960285.1 | usgscuuaAfaAfGfGfgacaguauuuL96 | 383 | asAfsggga(Agn)cugaagCfcAfucgguscsa | 760 | UGACCGAUGGCUUCAGUUCCCUG | 364 |
| AD-960469.1 | usgsgcuuCfaGfUfUfcccugaaaguL96 | 445 | asUfsccag(Cgn)uuuauuGfgGfaggccsasg | 761 | CUGGCCUCCCAAUAAAGCUGGAC | 567 |
| AD-960387.1 | usgsaaagAfcUfAfCfuggagcaccuL96 | 556 | asGfsuauu(Ggn)aggucuCfaGfgcagcscsa | 762 | UGGCUGCCUGAGACCUCAAUACC | 564 |
| AD-960384.1 | csusgccuGfaGfAfCfcucaauaccuL96 | 478 | asUfsugag(Ggn)ucucagGfcAfgccacsgsg | 763 | CCGUGGCUGCCUGAGACCUCAAU | 582 |
| AD-960109.1 | gscscaccAfaGfAfCfcgccaaggauL96 | 598 | asAfsgcug(Cgn)cucuagGfgAfugaacsusg | 764 | CAGUUCAUCCCUAGAGGCAGCUG | 645 |
| AD-960112.1 | cscsaccaAfgAfCfCfgccaaggauuL96 | 418 | asAfsgcag(Cgn)ugccucUfaGfggaugsasa | 765 | UUCAUCCCUAGAGGCAGCUGCUC | 477 |
| AD-960386.1 | uscsccuaGfaGfGfCfagcugcuccuL96 | 517 | asUfsauug(Agn)ggucucAfgGfcagccsasc | 766 | GUGGCUGCCUGAGACCUCAAUAC | 573 |
| AD-960302.1 | csasguucCfcUfGfAfaagacuacuuL96 | 469 | asUfsgcuc(Cgn)aguaguCfuUfucaggsgsa | 767 | UCCCUGAAAGACUACUGGAGCAC | 474 |
| AD-960118.1 | usgsuaggUfuGfCfUfuaaaagggauL96 | 529 | asUfsccug(Ggn)agcagcUfgCfcucuasgsg | 768 | CCUAGAGGCAGCUGCUCCAGGAA | 639 |
| AD-960111.1 | gsgsagcaCfcGfUfUfaaggacaaguL96 | 586 | asGfscagc(Tgn)gccucuAfgGfgaugasasc | 769 | GUUCAUCCCUAGAGGCAGCUGCU | 606 |
| AD-960299.1 | asasgacuAfcUfGfGfagcaccguuuL96 | 442 | asUfsccag(Tgn)agucuuUfcAfgggaascsu | 770 | AGUUCCCUGAAAGACUACUGGAG | 486 |
| AD-960115.1 | gsasggcaGfcUfGfCfuccaggaacuL96 | 577 | asUfsggag(Cgn)agcugcCfnCfuagggsasu | 771 | AUCCCUAGAGGCAGCUGCUCCAG | 501 |
| AD-960439.1 | csasagacCfgCfCfAfaggaugcacuL96 | 772 | asGfsaaua(Cgn)ugucccUfuUfuaagcsasa | 773 | UUGCUUAAAAGGGACAGUAUUCU | 391 |
| AD-960441.1 | cscscugaAfaGfAfCfuacuggagcuL96 | 460 | asGfsagaa(Tgn)acugucCfcUfuuuaasgsc | 774 | GCUUAAAAGGGACAGUAUUCUCA | 367 |
| AD-960232.1 | csasccaaGfaCfCfGfccaaggauguL96 | 490 | asCfscuug(Ggn)cggucuUfgGfuggcgsusg | 775 | CACGCCACCAAGACCGCCAAGGA | 543 |
| AD-960276.1 | gscsagcuGfcUfCfCfaggaacagauL96 | 538 | asAfsagcc(Agn)ucggucAfcCfcagccscsc | 776 | GGGGCUGGGUGACCGAUGGCUUC | 468 |
| AD-960435.1 | uscsccugAfaAfGfAfcuacuggaguL96 | 511 | asAfscugu(Cgn)ccuuuuAfaGfcaaccsusa | 777 | UAGGUUGCUUAAAAGGGACAGUA | 411 |
| AD-960306.1 | ascscgauGfgCfUfUfcaguucccuuL96 | 362 | asAfscggu(Ggn)cuccagUfaGfucuuuscsa | 778 | UGAAAGACUACUGGAGCACCGUU | 534 |
| AD-960172.1 | gsgsccucCfcAfAfUfaaagcuggauL96 | 565 | asCfscucg(Ggn)ccucugAfaGfcucggsgsc | 779 | GCCCGAGCUUCAGAGGCCGAGGA | 633 |
| AD-960385.1 | gscsugccUfgAfGfAfccucaauacuL96 | 562 | asAfsuuga(Ggn)gucucaGfgCfagccascsg | 780 | CGUGGCUGCCUGAGACCUCAAUA | 549 |
| AD-960110.1 | gsusggcuGfcCfUfGfagaccucaauL96 | 580 | asCfsagcu(Ggn)ccucuaGfgGfaugaascsu | 781 | AGUUCAUCCCUAGAGGCAGCUGC | 609 |
| AD-960116.1 | gsusucauCfcCfUfAfgaggcagcuuL96 | 643 | asCfsugga(Ggn)cagcugCfcUfcuaggsgsa | 782 | UCCCUAGAGGCAGCUGCUCCAGG | 528 |
| AD-960434.1 | csasucccUfaGfAfGfgcagcugcuuL96 | 475 | asCfsuguc(Cgn)cuuuuaAfgCfaaccusasc | 783 | GUAGGUUGCUUAAAAGGGACAGU | 495 |
| AD-960430.1 | gsgscugcCfuGfAfGfaccucaauauL96 | 571 | asCfsccuu(Tgn)uaagcaAfcCfuacagsgsg | 784 | CCCUGUAGGUUGCUUAAAAGGGA | 591 |
| AD-960305.1 | cscsugaaAfgAfCfUfacuggagcauL96 | 472 | asCfsggug(Cgn)uccaguAfgUfcuuucsasg | 785 | CUGAAAGACUACUGGAGCACCGU | 576 |
| AD-960279.1 | usasgaggCfaGfCfUfgcuccaggauL96 | 637 | asCfsugaa(Ggn)ccaucgGfuCfacccasgsc | 786 | GCUGGGUGACCGAUGGCUUCAGU | 630 |
| AD-960298.1 | uscsauccCfuAfGfAfggcagcugcuL96 | 604 | asCfscagu(Agn)gucuuuCfaGfggaacsusg | 787 | CAGUUCCCUGAAAGACUACUGGA | 594 |
| AD-960284.1 | ususcccuGfaAfAfGfacuacuggauL96 | 484 | asGfsggaa(Cgn)ugaagcCfaUfcggucsasc | 788 | GUGACCGAUGGCUUCAGUUCCCU | 516 |
| AD-960313.1 | cscscuagAfgGfCfAfgcugcuccauL96 | 499 | asGfsuccu(Tgn)aacgguGfcUfccagusasg | 789 | CUACUGGAGCACCGUUAAGGACA | 627 |
| AD-960432.1 | gscsuuaaAfaGfGfGfacaguauucuL96 | 389 | asGfsuccc(Tgn)uuuaagCfaAfccuacsasg | 790 | CUGUAGGUUGCUUAAAAGGGACA | 525 |
| AD-960124.1 | ususaaaaGfgGfAfCfaguauucucuL96 | 365 | asCfsucug(Tgn)uccuggAfgCfagcugscsc | 791 | GGCAGCUGCUCCAGGAACAGAGG | 651 |
| AD-960119.1 | csgsccacCfaAfGfAfccgccaagguL96 | 541 | asUfsuccu(Ggn)gagcagCfuGfccucusasg | 792 | CUAGAGGCAGCUGCUCCAGGAAC | 603 |
| AD-960437.1 | gsgscuggGfuGfAfCfcgauggcuuuL96 | 466 | asAfsuacu(Ggn)ucccuuUfuAfagcaascsc | 793 | GGUUGCUUAAAAGGGACAGUAUU | 794 |
| AD-960315.1 | gsgsuugcUfuAfAfAfagggacaguuL96 | 409 | asUfsuguc(Cgn)uuaacgGfuGfcuccasgsu | 795 | ACUGGAGCACCGUUAAGGACAAG | 504 |
| AD-960117.1 | asasagacUfaCfUfGfgagcaccguuL96 | 532 | asCfscugg(Agn)gcagcuGfcCfucuagsgsg | 796 | CCCUAGAGGCAGCUGCUCCAGGA | 657 |
| AD-960311.1 | cscsgagcUfuCfAfGfaggccgagguL96 | 631 | asCfscuua(Agn)cggugcUfcCfaguagsusc | 797 | GACUACUGGAGCACCGUUAAGGA | 546 |
| AD-960272.1 | usgsgcugCfcUfGfAfgaccucaauuL96 | 547 | asUfsgcug(Ggn)gccaccUfgGfgacucscsu | 798 | AGGAGUCCCAGGUGGCCCAGCAG | 660 |
| AD-960414.1 | ususcaucCfcUfAfGfaggcagcuguL96 | 607 | asUfsgcag(Ggn)acccaaGfgAfgcucgscsa | 799 | UGCGAGCUCCUUGGGUCCUGCAA | 612 |
| AD-960240.1 | cscsuagaGfgCfAfGfcugcuccaguL96 | 526 | asCfsagug(Cgn)auccuuGfgCfggucususg | 800 | CAAGACCGCCAAGGAUGCACUGA | 663 |
| AD-960286.1 | asgsguugCfuUfAfAfaagggacaguL96 | 493 | asCfsaggg(Agn)acugaaGfcCfaucggsusc | 801 | GACCGAUGGCUUCAGUUCCCUGA | 522 |
| AD-960281.1 | csusguagGfuUfGfCfuuaaaaggguL96 | 589 | asAfsacug(Agn)agccauCfgGfucaccscsa | 802 | UGGGUGACCGAUGGCUUCAGUUC | 672 |
| AD-960277.1 | gsasaagaCfuAfCfUfggagcaccguL96 | 574 | asGfsaagc(Cgn)aucgguCfaCfccagcscsc | 803 | GGGCUGGGUGACCGAUGGCUUCA | 585 |
| AD-960274.1 | usgsggugAfcCfGfAfuggcuucaguL96 | 628 | asUfsggcc(Tgn)gcugggCfcAfccuggsgsa | 804 | UCCCAGGUGGCCCAGCAGGCCAG | 666 |
| AD-960108.1 | gsusucccUfgAfAfAfgacuacugguL96 | 592 | asGfscugc(Cgn)ucuaggGfaUfgaacusgsa | 805 | UCAGUUCAUCCCUAGAGGCAGCU | 624 |
| AD-960239.1 | gsasccgaUfgGfCfUfucaguucccuL96 | 514 | asAfsgugc(Agn)uccuugGfcGfgucuusgsg | 806 | CCAAGACCGCCAAGGAUGCACUG | 561 |
| AD-960122.1 | ascsuggaGfcAfCfCfguuaaggacuL96 | 625 | asCfsuguu(Cgn)cuggagCfaGfcugccsusc | 807 | GAGGCAGCUGCUCCAGGAACAGA | 615 |
| AD-960291.1 | gsusagguUfgCfUfUfaaaagggacuL96 | 523 | asUfscuuu(Cgn)agggaaCfuGfaagccsasu | 808 | AUGGCUUCAGUUCCCUGAAAGAC | 552 |
| AD-960125.1 | csasgcugCfuCfCfAfggaacagaguL96 | 649 | asCfscucu(Ggn)uuccugGfaGfcagcusgsc | 809 | GCAGCUGCUCCAGGAACAGAGGU | 690 |
| AD-960231.1 | asgsaggcAfgCfUfGfcuccaggaauL96 | 601 | asCfsuugg(Cgn)ggucuuGfgUfggcgusgsc | 810 | GCACGCCACCAAGACCGCCAAGG | 669 |
| AD-960275.1 | ususgcuuAfaAfAfGfggacaguauuL96 | 811 | asAfsgcca(Tgn)cggucaCfcCfagcccscsu | 812 | AGGGGCUGGGUGACCGAUGGCUU | 597 |
| AD-960173.1 | usgsgagcAfcCfGfUfuaaggacaauL96 | 502 | asUfsccuc(Ggn)gccucuGfaAfgcucgsgsg | 813 | CCCGAGCUUCAGAGGCCGAGGAU | 654 |
| AD-960271.1 | csusagagGfcAfGfCfugcuccagguL96 | 655 | asGfscugg(Ggn)ccaccuGfgGfacuccsusg | 814 | CAGGAGUCCCAGGUGGCCCAGCA | 678 |
| AD-960433.1 | csusacugGfaGfCfAfccguuaagguL96 | 544 | asUfsgucc(Cgn)uuuuaaGfcAfaccuascsa | 815 | UGUAGGUUGCUUAAAAGGGACAG | 489 |
| AD-960267.1 | gsasguccCfaGfGfUfggcccagcauL96 | 658 | asGfsgcca(Cgn)cugggaCfuCfcugcascsg | 816 | CGUGCAGGAGUCCCAGGUGGCCC | 684 |
| AD-960236.1 | csgsagcuCfcUfUfGfgguccugcauL96 | 610 | asGfscauc(Cgn)uuggcgGfuCfuuggusgsg | 817 | CCACCAAGACCGCCAAGGAUGCA | 636 |
| AD-960310.1 | asgsaccgCfcAfAfGfgaugcacuguL96 | 661 | asCfsuuaa(Cgn)ggugcuCfcAfguaguscsu | 818 | AGACUACUGGAGCACCGUUAAGG | 648 |
| AD-960312.1 | cscsgaugGfcUfUfCfaguucccuguL96 | 520 | asUfsccuu(Agn)acggugCfuCfcaguasgsu | 819 | ACUACUGGAGCACCGUUAAGGAC | 675 |
| AD-960309.1 | gsgsugacCfgAfUfGfgcuucaguuuL96 | 670 | asUfsuaac(Ggn)gugcucCfaGfuagucsusu | 820 | AAGACUACUGGAGCACCGUUAAG | 621 |
| AD-960440.1 | gscsugggUfgAfCfCfgauggcuucuL96 | 583 | asAfsgaau(Agn)cuguccCfuUfuuaagscsa | 821 | UGCUUAAAAGGGACAGUAUUCUC | 379 |
| AD-960237.1 | cscsagguGfgCfCfCfagcaggccauL96 | 664 | asUfsgcau(Cgn)cuuggcGfgUfcuuggsusg | 822 | CACCAAGACCGCCAAGGAUGCAC | 618 |
| AD-960268.1 | asgsuucaUfcCfCfUfagaggcagcuL96 | 622 | asGfsggcc(Agn)ccugggAfcUfccugcsasc | 823 | GUGCAGGAGUCCCAGGUGGCCCA | 681 |
| AD-960269.1 | asasgaccGfcCfAfAfggaugcacuuL96 | 559 | asUfsgggc(Cgn)accuggGfaCfuccugscsa | 824 | UGCAGGAGUCCCAGGUGGCCCAG | 687 |
| AD-960280.1 | gsgscagcUfgCfUfCfcaggaacaguL96 | 613 | asAfscuga(Agn)gccaucGfgUfcacccsasg | 825 | CUGGGUGACCGAUGGCUUCAGUU | 642 |
| AD-960270.1 | gsgscuucAfgUfUfCfccugaaagauL96 | 550 | asCfsuggg(Cgn)caccugGfgAfcuccusgsc | 826 | GCAGGAGUCCCAGGUGGCCCAGC | 696 |
| AD-960273.1 | asgscugcUfcCfAfGfgaacagagguL96 | 688 | asCfsugcu(Ggn)ggccacCfuGfggacuscsc | 827 | GGAGUCCCAGGUGGCCCAGCAGG | 693 |

TABLE 6
APOC3 Single Dose Screens in Hep3B cells

| | 50 nM Dose | | 10 nM Dose | | 1.0 nM Dose | | 0.1 nM Dose | |
|---|---|---|---|---|---|---|---|---|
| | Avg % | | Avg % | | Avg % | | Avg % | |
| | APOC3 | | APOC3 | | APOC3 | | APOC3 | |
| | mRNA | | mRNA | | mRNA | | mRNA | |
| Duplex | Remaining | SD | Remaining | SD | Remaining | SD | Remaining | SD |
| AD-959917.1 | 4.2 | 1.8 | 5.1 | 1.6 | 17.7 | 3.8 | 53.5 | 5.1 |
| AD-959918.1 | 5.1 | 0.8 | 5.6 | 2.2 | 34.5 | 13.4 | 52.1 | 10.0 |
| AD-960096.1 | 7.8 | 4.6 | 7.3 | 2.2 | 24.3 | 2.1 | 88.2 | 6.8 |
| AD-960064.1 | 3.7 | 0.4 | 8.2 | 1.0 | 22.1 | 6.2 | 40.1 | 7.3 |
| AD-959914.1 | 5.9 | 1.1 | 9.8 | 2.4 | 39.4 | 4.2 | 70.4 | 17.8 |
| AD-959941.1 | 11.5 | 6.1 | 9.9 | 1.7 | 33.7 | 2.9 | 75.4 | 4.8 |
| AD-960031.1 | 6.5 | 2.2 | 9.9 | 3.0 | 18.8 | 3.4 | 47.6 | 2.7 |
| AD-959910.1 | 5.5 | 0.9 | 10.5 | 1.6 | 28.4 | 7.3 | 60.4 | 5.8 |
| AD-960063.1 | 8.5 | 3.1 | 11.1 | 2.4 | 29.7 | 7.1 | 79.4 | 10.0 |
| AD-67781.7 | 6.1 | 1.5 | 11.2 | 2.5 | 45.7 | 2.2 | 61.4 | 3.7 |
| AD-67782.2 | 6.3 | 1.0 | 12.4 | 5.6 | 38.0 | 2.3 | 68.4 | 8.5 |
| AD-959916.1 | 5.3 | 0.7 | 12.5 | 2.8 | 45.6 | 5.9 | 58.5 | 2.0 |
| AD-959913.1 | 6.2 | 0.3 | 12.7 | 1.1 | 32.2 | 5.9 | 67.0 | 10.0 |
| AD-960066.1 | 7.7 | 1.1 | 13.2 | 1.6 | 42.3 | 3.7 | 94.7 | 27.8 |
| AD-960062.1 | 8.8 | 1.2 | 13.7 | 1.8 | 48.8 | 4.7 | 73.1 | 16.8 |
| AD-960093.1 | 12.5 | 1.8 | 13.7 | 3.0 | 37.4 | 12.5 | 64.0 | 17.2 |
| AD-960061.1 | 7.3 | 0.4 | 13.9 | 1.3 | 42.4 | 7.9 | 69.2 | 10.6 |
| AD-960092.1 | 16.2 | 10.7 | 14.2 | 2.0 | 53.1 | 13.9 | 95.0 | 13.2 |
| AD-960030.1 | 14.8 | 5.6 | 14.7 | 1.2 | 40.7 | 8.2 | 94.2 | 9.5 |
| AD-80794.6 | 15.2 | 6.5 | 15.5 | 1.7 | 41.3 | 5.3 | 84.6 | 1.8 |
| AD-960095.1 | 12.6 | 1.6 | 16.0 | 1.9 | 55.4 | 9.0 | 86.4 | 2.9 |
| AD-959938.1 | 14.9 | 8.3 | 16.5 | 3.4 | 59.9 | 12.6 | 83.8 | 4.5 |
| AD-960065.1 | 12.6 | 3.5 | 17.1 | 3.8 | 51.7 | 7.4 | 79.1 | 10.3 |
| AD-959907.1 | 10.7 | 5.0 | 17.4 | 6.4 | 51.1 | 3.5 | 89.4 | 10.9 |
| AD-960094.1 | 12.4 | 3.7 | 18.8 | 5.3 | 76.5 | 17.2 | 131.2 | 4.0 |
| AD-960060.1 | 12.9 | 2.6 | 19.3 | 3.7 | 77.8 | 5.5 | 69.6 | 5.8 |
| AD-959919.1 | 14.1 | 3.1 | 19.8 | 2.0 | 72.6 | 13.4 | 105.9 | 9.6 |
| AD-959932.1 | 11.8 | 5.9 | 20.1 | 8.9 | 47.1 | 9.8 | 102.2 | 4.3 |
| AD-959859.1 | 20.6 | 8.2 | 20.5 | 6.8 | 93.5 | 12.1 | 161.4 | 40.6 |
| AD-959908.1 | 9.6 | 2.2 | 20.8 | 2.5 | 48.7 | 4.7 | 78.8 | 18.0 |
| AD-959903.1 | 12.9 | 5.5 | 20.9 | 3.1 | 58.0 | 14.2 | 96.2 | 12.5 |
| AD-960097.1 | 19.1 | 6.5 | 21.0 | 4.9 | 77.5 | 11.3 | 78.4 | 3.8 |
| AD-959912.1 | 12.0 | 1.3 | 21.1 | 1.3 | 75.3 | 10.6 | 108.4 | 26.5 |
| AD-960067.1 | 19.9 | 4.6 | 21.2 | 3.6 | 81.4 | 11.3 | 85.8 | 9.3 |
| AD-959927.1 | 16.1 | 2.6 | 21.3 | 6.3 | 68.8 | 13.0 | 102.7 | 17.7 |
| AD-960099.1 | 13.4 | 3.0 | 21.9 | 3.6 | 46.1 | 8.7 | 76.3 | 4.2 |
| AD-959931.1 | 20.4 | 5.4 | 22.6 | 7.6 | 58.7 | 5.0 | 105.7 | 12.0 |
| AD-959879.1 | 12.6 | 5.1 | 22.8 | 6.0 | 89.8 | 10.4 | 78.1 | 2.3 |
| AD-960091.1 | 29.8 | 7.8 | 23.2 | 6.8 | 84.3 | 16.5 | 159.8 | 73.0 |
| AD-959921.1 | 14.9 | 5.1 | 23.2 | 6.6 | 64.2 | 8.3 | 71.0 | 7.7 |
| AD-960102.1 | 19.2 | 3.9 | 23.3 | 10.3 | 43.4 | 10.5 | 75.9 | 13.5 |
| AD-80793.6 | 21.8 | 3.6 | 24.3 | 3.9 | 51.8 | 12.8 | 90.4 | 7.2 |
| AD-959925.1 | 13.0 | 1.5 | 25.2 | 3.3 | 75.6 | 10.3 | 87.4 | 21.4 |
| AD-960098.1 | 31.3 | 4.6 | 26.8 | 6.1 | 103.2 | 15.8 | 93.3 | 4.5 |
| AD-959901.1 | 23.6 | 8.4 | 27.1 | 6.8 | 97.7 | 8.5 | 162.1 | 29.0 |
| AD-959920.1 | 21.7 | 0.4 | 28.1 | 4.4 | 83.1 | 11.3 | 101.1 | 20.9 |
| AD-959926.1 | 21.6 | 6.1 | 29.3 | 8.9 | 98.8 | 21.6 | 113.8 | 18.8 |
| AD-959737.1 | 33.0 | 9.7 | 30.3 | 7.5 | 78.6 | 12.9 | 95.6 | 8.4 |
| AD-960011.1 | 14.5 | 4.9 | 33.2 | 5.1 | 104.7 | 19.0 | 101.2 | 12.7 |
| AD-960101.1 | 24.7 | 4.0 | 33.2 | 10.2 | 82.8 | 7.0 | 159.8 | 73.4 |
| AD-959923.1 | 14.1 | 3.3 | 33.2 | 2.8 | 74.7 | 12.0 | 78.8 | 4.9 |
| AD-68107.2 | 21.1 | 5.4 | 33.3 | 5.5 | 67.1 | 11.7 | 113.1 | 10.0 |
| AD-960058.1 | 35.5 | 4.4 | 33.7 | 6.2 | 98.2 | 19.6 | 138.9 | 18.2 |
| AD-68103.2 | 27.9 | 6.5 | 34.1 | 11.0 | 69.9 | 2.5 | 105.4 | 14.6 |
| AD-959860.1 | 27.6 | 6.2 | 35.5 | 11.2 | 98.2 | 16.5 | 164.2 | 15.9 |
| AD-960059.1 | 17.1 | 2.1 | 38.7 | 5.3 | 131.1 | 18.8 | 119.6 | 59.9 |
| AD-960103.1 | 40.3 | 3.0 | 39.4 | 5.8 | 69.9 | 4.1 | 95.8 | 2.3 |
| AD-959740.1 | 37.2 | 4.1 | 39.5 | 5.8 | 97.8 | 27.9 | 96.4 | 7.4 |
| AD-959939.1 | 31.1 | 2.2 | 40.4 | 6.6 | 94.9 | 12.6 | 104.9 | 21.0 |
| AD-959865.1 | 35.7 | 8.5 | 41.0 | 2.8 | 92.9 | 11.8 | 111.2 | 7.3 |
| AD-960100.1 | 31.6 | 3.3 | 43.2 | 10.9 | 75.7 | 11.1 | 103.8 | 17.7 |
| AD-959924.1 | 21.9 | 4.3 | 43.2 | 8.2 | 102.8 | 20.3 | 96.8 | 10.7 |
| AD-959909.1 | 24.2 | 3.5 | 45.1 | 3.1 | 92.8 | 7.8 | 79.7 | 3.7 |
| AD-959739.1 | 38.8 | 2.4 | 46.4 | 7.9 | 101.5 | 5.6 | 108.4 | 4.3 |
| AD-959911.1 | 21.5 | 3.8 | 46.9 | 9.1 | 90.4 | 13.1 | 104.5 | 9.5 |
| AD-960057.1 | 32.9 | 2.5 | 47.8 | 3.1 | 95.1 | 7.8 | 79.8 | 12.9 |
| AD-959741.1 | 42.5 | 1.7 | 48.5 | 6.4 | 89.5 | 14.3 | 117.1 | 10.4 |
| AD-960056.1 | 24.9 | 0.9 | 48.6 | 6.1 | 87.6 | 15.6 | 85.7 | 6.9 |
| AD-959930.1 | 52.4 | 8.4 | 49.4 | 9.3 | 86.6 | 17.9 | 118.5 | 15.0 |
| AD-959746.1 | 41.4 | 5.4 | 49.6 | 2.4 | 62.0 | 7.8 | 111.9 | 15.6 |
| AD-959748.1 | 40.9 | 5.9 | 50.1 | 15.5 | 89.4 | 14.7 | 100.3 | 10.6 |
| AD-959857.1 | 41.9 | 19.2 | 51.7 | 3.9 | 106.7 | 11.7 | 105.0 | 14.0 |
| AD-959935.1 | 35.3 | 2.3 | 54.1 | 13.2 | 126.1 | 24.7 | 188.1 | 72.0 |
| AD-960008.1 | 56.3 | 9.9 | 54.4 | 5.8 | 92.2 | 7.7 | 109.6 | 19.1 |
| AD-959915.1 | 30.3 | 5.8 | 57.3 | 3.7 | 104.2 | 15.9 | 82.1 | 7.3 |
| AD-959738.1 | 52.6 | 10.0 | 58.6 | 9.4 | 94.3 | 14.0 | 100.5 | 22.3 |
| AD-959928.1 | 42.3 | 6.1 | 60.0 | 7.6 | 85.3 | 11.8 | 123.3 | 14.2 |
| AD-959863.1 | 58.7 | 4.0 | 60.1 | 9.5 | 81.4 | 4.9 | 119.4 | 8.8 |
| AD-960010.1 | 58.6 | 8.9 | 60.3 | 11.8 | 115.5 | 18.5 | 105.5 | 13.5 |
| AD-960090.1 | 73.2 | 10.7 | 60.5 | 16.0 | 102.0 | 14.8 | 95.3 | 11.5 |
| AD-959732.1 | 45.4 | 6.7 | 63.0 | 6.1 | 101.4 | 14.6 | 118.0 | 11.4 |
| AD-960009.1 | 50.6 | 5.9 | 63.1 | 17.5 | 106.1 | 10.9 | 109.4 | 19.6 |
| AD-959929.1 | 72.2 | 10.3 | 66.2 | 15.5 | 140.7 | 47.3 | 108.3 | 18.1 |
| AD-959745.1 | 48.8 | 7.7 | 66.8 | 15.0 | 104.7 | 17.4 | 125.3 | 7.3 |
| AD-960007.1 | 64.1 | 8.4 | 67.0 | 13.1 | 86.3 | 8.9 | 104.1 | 7.6 |
| AD-959902.1 | 41.4 | 9.8 | 68.2 | 4.7 | 98.8 | 18.0 | 132.1 | 37.4 |
| AD-959940.1 | 50.8 | 9.8 | 69.0 | 9.1 | 105.0 | 18.3 | 96.8 | 13.0 |
| AD-960055.1 | 52.7 | 8.5 | 70.1 | 5.7 | 101.4 | 20.6 | 115.3 | 18.2 |
| AD-959922.1 | 54.7 | 6.2 | 70.1 | 6.4 | 113.6 | 16.0 | 93.0 | 7.3 |
| AD-959900.1 | 65.2 | 7.0 | 70.6 | 5.3 | 102.9 | 11.3 | 179.9 | 77.2 |
| AD-959858.1 | 72.9 | 18.5 | 71.4 | 17.7 | 103.4 | 11.1 | 116.6 | 6.1 |
| AD-959744.1 | 56.0 | 11.2 | 71.6 | 22.1 | 106.2 | 18.3 | 127.0 | 21.8 |
| AD-959736.1 | 67.3 | 8.2 | 72.6 | 10.6 | 100.5 | 15.8 | 108.3 | 15.6 |
| AD-959735.1 | 68.8 | 14.9 | 75.5 | 15.3 | 112.0 | 26.5 | 116.0 | 19.0 |
| AD-960039.1 | 94.8 | 13.8 | 75.5 | 15.3 | 112.7 | 8.6 | 138.0 | 14.7 |
| AD-959747.1 | 75.4 | 8.4 | 76.0 | 10.3 | 121.7 | 13.3 | 100.0 | 5.8 |
| AD-959862.1 | 79.3 | 3.4 | 77.9 | 25.8 | 103.2 | 7.9 | 118.8 | 12.4 |
| AD-959933.1 | 66.7 | 12.1 | 79.0 | 10.7 | 121.8 | 16.7 | 142.3 | 29.2 |
| AD-959733.1 | 60.8 | 10.8 | 81.7 | 15.8 | 95.7 | 15.4 | 114.2 | 9.7 |
| AD-959937.1 | 65.7 | 6.0 | 85.2 | 13.6 | 120.8 | 17.1 | 101.8 | 3.2 |
| AD-959904.1 | 52.7 | 7.6 | 86.9 | 6.4 | 130.2 | 24.2 | 124.9 | 16.7 |
| AD-959797.1 | 85.6 | 3.9 | 87.2 | 16.3 | 102.0 | 5.9 | 129.5 | 24.1 |
| AD-959861.1 | 63.0 | 14.0 | 88.4 | 16.5 | 109.2 | 7.3 | 140.1 | 25.0 |
| AD-959743.1 | 56.2 | 4.8 | 89.3 | 9.4 | 100.1 | 5.8 | 143.9 | 25.4 |
| AD-959905.1 | 55.9 | 20.6 | 91.7 | 11.8 | 110.6 | 16.2 | 122.3 | 33.1 |
| AD-959734.1 | 67.0 | 10.9 | 93.5 | 18.4 | 100.7 | 19.0 | 128.9 | 13.4 |
| AD-959934.1 | 82.1 | 17.1 | 95.1 | 24.1 | 109.8 | 7.7 | 115.6 | 12.4 |
| AD-959749.1 | 74.1 | 15.9 | 95.7 | 13.1 | 111.2 | 15.8 | 129.2 | 16.1 |
| AD-959798.1 | 111.9 | 18.4 | 96.6 | 20.7 | 134.4 | 42.1 | 124.5 | 40.5 |
| AD-959742.1 | 79.3 | 6.8 | 104.1 | 18.5 | 117.5 | 14.2 | 167.7 | 48.7 |
| AD-959897.1 | 114.4 | 14.2 | 104.7 | 20.1 | 95.8 | 14.8 | 103.7 | 11.1 |
| AD-959864.1 | 139.0 | 7.4 | 108.7 | 19.7 | 121.8 | 8.3 | 134.4 | 34.1 |
| AD-959899.1 | 111.2 | 12.3 | 109.0 | 17.8 | 99.4 | 6.6 | 114.9 | 19.1 |
| AD-959856.1 | 120.8 | 10.0 | 112.1 | 6.2 | 142.0 | 30.4 | 86.1 | 4.2 |
| AD-959906.1 | 87.2 | 12.3 | 112.3 | 15.7 | 119.5 | 3.6 | 123.0 | 9.0 |
| AD-959936.1 | 95.8 | 11.2 | 112.6 | 17.9 | 108.7 | 12.1 | 133.5 | 20.9 |
| AD-959896.1 | 86.2 | 10.8 | 114.9 | 9.7 | 104.9 | 12.0 | 111.6 | 13.5 |
| AD-959893.1 | 110.4 | 6.1 | 115.5 | 23.1 | 102.0 | 14.7 | 112.9 | 9.6 |
| AD-959892.1 | 97.9 | 20.0 | 118.4 | 10.8 | 97.9 | 9.2 | 114.0 | 14.5 |
| AD-959894.1 | 118.2 | 10.8 | 132.2 | 25.9 | 103.5 | 3.9 | 134.0 | 17.1 |
| AD-959750.1 | 150.2 | 3.6 | 136.5 | 12.9 | 113.4 | 7.3 | 135.5 | 21.5 |
| AD-959898.1 | 129.1 | 11.8 | 139.1 | 29.1 | 125.4 | 12.1 | 137.4 | 13.5 |
| AD-959895.1 | 107.1 | 12.9 | 158.5 | 27.8 | 116.8 | 12.8 | 133.9 | 13.1 |

TABLE 7
APOC3 Single Dose Screens in Hep3B cells

| | 50 nM Dose | | 10 nM Dose | | 1.0 nM Dose | | 0.1 nM Dose | |
|---|---|---|---|---|---|---|---|---|
| | Avg % | | Avg % | | Avg % | | Avg % | |
| | APOC3 | | APOC3 | | APOC3 | | APOC3 | |
| | mRNA | | mRNA | | mRNA | | mRNA | |
| Duplex | Remaining | SD | Remaining | SD | Remaining | SD | Remaining | SD |
| AD-960293.1 | 5.3 | 1.1 | 4.4 | 0.9 | 12.7 | 3.6 | 49.3 | 8.8 |
| AD-960288.1 | 7.1 | 1.1 | 4.5 | 0.3 | 16.4 | 2.8 | 60.9 | 3.2 |
| AD-960445.1 | 7.2 | 2.3 | 4.6 | 0.9 | 24.9 | 4.1 | 67.0 | 11.2 |
| AD-960292.1 | 8.4 | 2.7 | 6.1 | 1.8 | 35.0 | 3.6 | 89.3 | 13.2 |
| AD-960475.1 | 9.5 | 1.8 | 6.2 | 1.5 | 20.0 | 7.7 | 79.7 | 7.4 |
| AD-960442.1 | 12.1 | 1.5 | 6.5 | 1.7 | 21.5 | 1.3 | 79.3 | 18.3 |
| AD-960470.1 | 11.8 | 1.9 | 7.1 | 0.6 | 40.0 | 10.6 | 78.1 | 5.5 |
| AD-960436.1 | 11.3 | 3.2 | 7.9 | 2.0 | 31.6 | 3.0 | 86.2 | 7.7 |
| AD-960446.1 | 8.3 | 1.8 | 8.4 | 1.6 | 43.0 | 10.6 | 77.2 | 4.3 |
| AD-960474.1 | 11.6 | 1.8 | 8.4 | 0.9 | 39.4 | 5.9 | 103.2 | 18.7 |
| AD-960294.1 | 14.0 | 1.7 | 8.5 | 1.6 | 32.8 | 9.1 | 74.7 | 5.8 |
| AD-960471.1 | 12.2 | 1.5 | 8.5 | 0.8 | 28.8 | 7.5 | 81.1 | 16.8 |
| AD-960314.1 | 11.0 | 0.4 | 9.3 | 1.1 | 41.2 | 9.8 | 79.2 | 4.3 |
| AD-960443.1 | 17.7 | 6.1 | 9.9 | 2.6 | 33.4 | 5.5 | 95.7 | 15.2 |
| AD-960282.1 | 12.2 | 1.9 | 10.0 | 2.4 | 51.8 | 13.2 | 106.4 | 30.6 |
| AD-960283.1 | 13.2 | 0.9 | 10.0 | 1.3 | 50.3 | 6.3 | 101.6 | 8.4 |
| AD-80794.7 | 9.5 | 1.4 | 10.8 | 2.5 | 34.9 | 9.1 | 78.4 | 7.5 |
| AD-960295.1 | 25.0 | 4.9 | 11.4 | 4.0 | 43.9 | 2.4 | 82.2 | 10.5 |
| AD-960478.1 | 15.1 | 1.9 | 11.8 | 3.4 | 17.7 | 2.1 | 62.6 | 9.7 |
| AD-960289.1 | 14.9 | 0.7 | 11.8 | 1.4 | 44.7 | 4.4 | 97.2 | 16.6 |
| AD-960481.1 | 17.1 | 2.8 | 12.8 | 2.3 | 25.9 | 6.9 | 56.2 | 2.0 |
| AD-960318.1 | 21.0 | 5.6 | 13.3 | 2.4 | 43.2 | 2.3 | 83.6 | 11.4 |
| AD-960297.1 | 21.5 | 2.5 | 14.1 | 1.8 | 49.0 | 5.0 | 103.4 | 9.0 |
| AD-960477.1 | 13.6 | 5.0 | 14.1 | 3.1 | 29.8 | 6.1 | 89.6 | 17.5 |
| AD-960317.1 | 20.9 | 5.7 | 14.3 | 3.9 | 48.5 | 19.9 | 101.0 | 28.8 |
| AD-960476.1 | 14.2 | 1.5 | 16.3 | 1.0 | 41.1 | 7.5 | 92.0 | 4.5 |
| AD-960241.1 | 15.6 | 2.3 | 17.1 | 1.4 | 68.4 | 8.4 | 103.7 | 27.4 |
| AD-960480.1 | 20.1 | 1.0 | 18.0 | 2.5 | 62.0 | 10.9 | 91.8 | 12.4 |
| AD-960482.1 | 25.5 | 6.0 | 19.8 | 2.8 | 37.2 | 3.5 | 60.8 | 11.6 |
| AD-80793.7 | 16.6 | 3.1 | 20.2 | 3.5 | 43.8 | 5.9 | 64.1 | 5.9 |
| AD-960107.1 | 30.1 | 1.1 | 20.6 | 3.8 | 61.2 | 8.7 | 95.4 | 14.3 |
| AD-960308.1 | 31.9 | 3.3 | 23.3 | 2.2 | 48.0 | 5.8 | 90.2 | 4.9 |
| AD-960121.1 | 25.3 | 4.5 | 24.7 | 4.5 | 65.9 | 7.8 | 87.0 | 12.5 |
| AD-960287.1 | 37.5 | 6.9 | 24.8 | 10.3 | 90.3 | 22.4 | 82.9 | 5.2 |
| AD-960473.1 | 22.4 | 5.3 | 25.1 | 3.4 | 98.0 | 19.4 | 104.8 | 24.8 |
| AD-960479.1 | 28.3 | 4.1 | 25.4 | 8.2 | 72.6 | 18.2 | 90.5 | 8.2 |
| AD-960278.1 | 22.8 | 5.6 | 25.6 | 5.4 | 71.9 | 8.8 | 105.8 | 15.8 |
| AD-960113.1 | 26.5 | 4.8 | 25.7 | 7.0 | 59.0 | 5.7 | 114.0 | 17.3 |
| AD-960472.1 | 38.2 | 8.0 | 26.5 | 8.2 | 56.0 | 8.7 | 107.3 | 28.4 |
| AD-960444.1 | 26.5 | 4.8 | 27.3 | 3.0 | 72.4 | 12.5 | 127.2 | 16.8 |
| AD-960303.1 | 30.6 | 4.3 | 28.4 | 6.1 | 82.0 | 15.0 | 104.9 | 20.2 |
| AD-960438.1 | 31.3 | 4.4 | 28.6 | 6.0 | 59.2 | 6.1 | 90.3 | 14.4 |
| AD-960290.1 | 29.8 | 5.6 | 30.3 | 3.9 | 80.8 | 4.3 | 107.1 | 12.4 |
| AD-960304.1 | 32.6 | 7.7 | 30.4 | 3.0 | 86.3 | 9.9 | 100.4 | 15.6 |
| AD-960388.1 | 29.6 | 2.0 | 30.7 | 2.2 | 71.8 | 11.7 | 102.8 | 27.2 |
| AD-960233.1 | 28.4 | 4.7 | 31.5 | 5.7 | 96.7 | 11.8 | 99.0 | 17.2 |
| AD-960234.1 | 46.3 | 7.2 | 33.1 | 8.5 | 93.3 | 10.2 | 97.3 | 14.5 |
| AD-960114.1 | 15.9 | 2.5 | 33.2 | 4.3 | 58.9 | 4.5 | 93.9 | 11.3 |
| AD-960296.1 | 49.5 | 5.3 | 34.5 | 9.2 | 70.8 | 7.0 | 93.6 | 8.3 |
| AD-960431.1 | 40.7 | 8.8 | 35.1 | 1.1 | 87.2 | 3.7 | 108.8 | 8.6 |
| AD-960316.1 | 35.5 | 2.6 | 37.2 | 8.2 | 78.9 | 14.8 | 93.4 | 15.1 |
| AD-960307.1 | 25.4 | 1.3 | 37.4 | 4.6 | 90.9 | 7.7 | 99.5 | 10.8 |
| AD-960120.1 | 21.4 | 1.7 | 37.8 | 5.6 | 86.5 | 12.6 | 107.1 | 16.1 |
| AD-960238.1 | 20.5 | 2.9 | 37.9 | 9.9 | 79.7 | 22.5 | 128.8 | 11.2 |
| AD-960301.1 | 35.6 | 6.4 | 38.2 | 7.4 | 75.6 | 9.0 | 101.6 | 21.1 |
| AD-960235.1 | 32.1 | 6.1 | 39.4 | 12.7 | 107.9 | 8.9 | 167.9 | 37.6 |
| AD-960123.1 | 29.3 | 3.4 | 42.8 | 3.8 | 85.3 | 7.9 | 101.2 | 19.9 |
| AD-960300.1 | 24.4 | 3.1 | 45.3 | 13.1 | 77.9 | 12.3 | 101.2 | 15.3 |
| AD-960285.1 | 64.5 | 4.8 | 46.0 | 6.9 | 86.7 | 12.6 | 98.6 | 9.4 |
| AD-960469.1 | 43.0 | 6.1 | 46.3 | 6.8 | 72.4 | 12.5 | 96.4 | 20.8 |
| AD-960387.1 | 40.5 | 2.6 | 46.6 | 16.0 | 94.0 | 8.6 | 99.9 | 6.8 |
| AD-960384.1 | 42.8 | 2.9 | 47.1 | 2.9 | 103.6 | 9.9 | 103.2 | 13.1 |
| AD-960109.1 | 41.1 | 5.7 | 48.6 | 6.8 | 66.1 | 7.0 | 81.6 | 10.0 |
| AD-960112.1 | 44.6 | 2.4 | 48.8 | 5.3 | 69.0 | 17.5 | 103.7 | 12.3 |
| AD-960386.1 | 59.3 | 4.9 | 49.2 | 10.1 | 100.5 | 20.4 | 106.1 | 13.2 |
| AD-960302.1 | 69.2 | 12.5 | 49.4 | 10.1 | 82.4 | 14.5 | 106.2 | 14.6 |
| AD-960118.1 | 44.1 | 5.1 | 49.7 | 10.8 | 98.1 | 23.5 | 136.2 | 29.0 |
| AD-960111.1 | 43.3 | 6.9 | 50.0 | 4.5 | 93.6 | 9.3 | 107.0 | 20.0 |
| AD-960299.1 | 44.7 | 5.2 | 51.2 | 4.0 | 105.0 | 11.8 | 114.8 | 7.7 |
| AD-960115.1 | 42.3 | 6.0 | 52.1 | 2.6 | 82.4 | 12.1 | 85.4 | 15.0 |
| AD-960439.1 | 51.3 | 16.3 | 52.8 | 1.8 | 92.2 | 13.9 | 98.5 | 12.5 |
| AD-960441.1 | 74.3 | 9.3 | 53.2 | 5.7 | 98.1 | 21.9 | 102.2 | 20.2 |
| AD-960232.1 | 43.3 | 6.8 | 54.7 | 4.6 | 105.5 | 8.5 | 109.6 | 5.2 |
| AD-960276.1 | 39.7 | 10.0 | 54.9 | 21.4 | 101.5 | 29.8 | 107.1 | 22.3 |
| AD-960435.1 | 64.2 | 1.1 | 57.2 | 4.9 | 85.5 | 12.3 | 109.9 | 13.3 |
| AD-960306.1 | 57.8 | 4.6 | 57.8 | 3.7 | 74.1 | 15.0 | 91.4 | 10.5 |
| AD-960172.1 | 39.5 | 1.4 | 57.8 | 3.6 | 117.6 | 27.7 | 115.2 | 36.2 |
| AD-960385.1 | 89.3 | 7.4 | 59.2 | 19.5 | 124.6 | 37.9 | 107.8 | 16.4 |
| AD-960110.1 | 36.5 | 2.7 | 62.2 | 15.6 | 64.7 | 6.4 | 82.5 | 12.4 |
| AD-960116.1 | 26.8 | 3.5 | 62.4 | 10.8 | 78.8 | 10.9 | 81.0 | 12.9 |
| AD-960434.1 | 64.8 | 7.8 | 63.1 | 19.2 | 79.0 | 6.8 | 111.8 | 14.9 |
| AD-960430.1 | 75.9 | 11.5 | 67.0 | 8.7 | 111.9 | 8.6 | 103.9 | 4.9 |
| AD-960305.1 | 54.3 | 7.1 | 68.7 | 18.0 | 83.3 | 9.3 | 106.2 | 24.0 |
| AD-960279.1 | 97.3 | 25.7 | 69.3 | 1.5 | 138.6 | 43.7 | 108.2 | 17.4 |
| AD-960298.1 | 82.1 | 2.0 | 72.0 | 18.4 | 81.0 | 18.2 | 97.0 | 22.4 |
| AD-960284.1 | 91.4 | 20.3 | 74.0 | 11.1 | 103.5 | 15.0 | 115.2 | 20.0 |
| AD-960313.1 | 88.5 | 3.6 | 74.6 | 18.9 | 116.9 | 17.3 | 96.1 | 8.5 |
| AD-960432.1 | 77.1 | 6.5 | 76.4 | 8.3 | 94.7 | 20.2 | 103.7 | 10.5 |
| AD-960124.1 | 62.0 | 6.5 | 76.7 | 9.3 | 110.4 | 22.7 | 115.3 | 9.8 |
| AD-960119.1 | 78.8 | 6.0 | 77.7 | 6.6 | 106.5 | 24.1 | 140.7 | 8.0 |
| AD-960437.1 | 101.3 | 8.8 | 77.7 | 11.6 | 98.4 | 23.9 | 116.1 | 21.1 |
| AD-960315.1 | 84.1 | 10.8 | 79.6 | 8.0 | 107.5 | 13.0 | 103.5 | 4.3 |
| AD-960117.1 | 82.4 | 28.4 | 81.8 | 8.8 | 126.7 | 10.4 | 118.9 | 17.6 |
| AD-960311.1 | 82.6 | 12.2 | 82.3 | 8.7 | 138.1 | 20.4 | 112.0 | 24.6 |
| AD-960272.1 | 90.8 | 17.5 | 84.1 | 4.2 | 114.7 | 13.2 | 90.1 | 4.8 |
| AD-960414.1 | 105.6 | 23.4 | 84.5 | 4.9 | 117.2 | 13.8 | 113.6 | 24.8 |
| AD-960240.1 | 81.0 | 9.2 | 85.6 | 14.5 | 98.0 | 5.1 | 95.5 | 27.7 |
| AD-960286.1 | 87.4 | 6.6 | 85.8 | 11.8 | 122.0 | 17.0 | 101.7 | 2.6 |
| AD-960281.1 | 119.9 | 27.1 | 86.6 | 23.2 | 120.5 | 17.4 | 112.4 | 6.8 |
| AD-960277.1 | 126.8 | 14.6 | 94.8 | 21.3 | 166.0 | 68.5 | 99.9 | 13.6 |
| AD-960274.1 | 120.6 | 27.3 | 95.6 | 17.5 | 128.4 | 17.1 | 123.9 | 27.1 |
| AD-960108.1 | 79.8 | 6.1 | 95.8 | 17.5 | 103.7 | 9.4 | 96.7 | 11.4 |
| AD-960239.1 | 106.5 | 19.7 | 95.9 | 13.8 | 112.7 | 16.0 | 109.3 | 10.7 |
| AD-960122.1 | 100.1 | 10.3 | 96.3 | 3.1 | 132.0 | 3.7 | 117.6 | 8.3 |
| AD-960291.1 | 111.5 | 17.5 | 96.3 | 18.2 | 99.9 | 18.0 | 125.3 | 23.6 |
| AD-960125.1 | 134.2 | 17.5 | 98.0 | 12.3 | 122.9 | 17.1 | 100.1 | 12.4 |
| AD-960231.1 | 95.9 | 17.6 | 99.4 | 23.7 | 99.8 | 27.2 | 99.9 | 23.1 |
| AD-960275.1 | 69.0 | 6.8 | 99.7 | 7.9 | 93.7 | 14.8 | 137.6 | 22.2 |
| AD-960173.1 | 81.3 | 13.7 | 99.8 | 30.0 | 96.3 | 19.1 | 104.6 | 28.9 |
| AD-960271.1 | 94.3 | 8.3 | 100.1 | 5.2 | 106.7 | 13.0 | 101.9 | 14.3 |
| AD-960433.1 | 165.5 | 10.3 | 101.1 | 10.9 | 145.3 | 26.4 | 101.8 | 9.0 |
| AD-960267.1 | 114.1 | 6.1 | 101.4 | 8.4 | 105.4 | 23.3 | 112.1 | 4.1 |
| AD-960236.1 | 95.8 | 5.7 | 101.8 | 10.5 | 106.6 | 25.8 | 110.3 | 13.0 |
| AD-960310.1 | 112.9 | 9.5 | 103.5 | 13.1 | 106.6 | 16.8 | 112.8 | 19.0 |
| AD-960312.1 | 106.2 | 3.8 | 103.8 | 17.4 | 147.1 | 31.1 | 107.2 | 8.8 |
| AD-960309.1 | 91.5 | 6.4 | 107.7 | 14.0 | 104.1 | 14.2 | 100.7 | 23.9 |
| AD-960440.1 | 106.8 | 12.6 | 110.3 | 15.5 | 89.7 | 23.6 | 108.7 | 17.4 |
| AD-960237.1 | 129.8 | 8.4 | 113.2 | 15.2 | 101.1 | 18.6 | 127.7 | 5.6 |
| AD-960268.1 | 100.0 | 8.7 | 114.3 | 5.7 | 97.1 | 5.1 | 89.3 | 16.4 |
| AD-960269.1 | 134.7 | 14.3 | 118.2 | 10.1 | 107.5 | 21.8 | 131.1 | 22.3 |
| AD-960280.1 | 83.9 | 4.5 | 121.9 | 23.0 | 116.0 | 20.5 | 118.5 | 41.7 |
| AD-960270.1 | 122.8 | 11.5 | 122.1 | 13.0 | 102.7 | 15.9 | 114.3 | 16.2 |
| AD-960273.1 | 149.2 | 4.7 | 142.6 | 33.3 | 107.4 | 10.5 | 145.7 | 16.6 |

### Example 3. In Vivo Screening of dsRNA Duplexes in Mice

[0772] Duplexes of interest, identified from the above in vitro studies, were evaluated in vivo. In particular, at pre-dose day −14 wild-type mice (C57BL/6) were transduced by retroorbital administration of 2×10¹⁰ viral particles of an adeno-associated virus 8 (AAV8) vector encoding human APOC3. In particular, mice were administered an AAV8 encoding the human APOC3 mRNA, referred to as AAV8-TBG-PI-APOC3.

[0773] At day 0, groups of three mice were subcutaneously administered a single 3 mg/kg dose of the agents of interest or PBS control. Table 8 provides the treatment groups and Table 9 provides the modified nucleotide sequences of the sense and antisense strands of the duplexes of interest. At day 7 or day 14 post-dose animals were sacrificed, liver samples were collected and snap-frozen in liquid nitrogen. Liver mRNA was extracted and analyzed by the RT-QPCR method.

[0774] Human APOC3 mRNA levels were compared to a housekeeping gene, GAPDH. The values were then normalized to the average of PBS vehicle control group. The data were expressed as percent of baseline value, and presented as mean plus standard deviation. The results, listed in Table 10 and shown in FIG. 1, demonstrate that the exemplary duplex agents tested effectively reduce the level of the human APOC3 messenger RNA in vivo.

TABLE 8
Treatment Groups

| Group | Animal | | | |
|---|---|---|---|---|
| # | # | Treatment | Dose | Timepoint |
| 1 | 1 | PBS | n/a | D0, D7, |
| | 2 | | | D14 |
| | 3 | | | |
| 2 | 4 | Naïve | n/a | |
| | 5 | | | |
| | 6 | | | |
| 3 | 7 | AD-959917.1 | 3 mpk | |
| | 8 | | | |
| | 9 | | | |
| 4 | 10 | AD-960064.1 | | |
| | 11 | | | |
| | 12 | | | |
| 5 | 13 | AD-960293.1 | | |
| | 14 | | | |
| | 15 | | | |
| 6 | 16 | AD-960288.1 | | |
| | 17 | | | |
| | 18 | | | |
| 7 | 19 | AD-960445.1 | | |
| | 20 | | | |
| | 21 | | | |
| 8 | 22 | AD-960292.1 | | |
| | 23 | | | |
| | 24 | | | |
| 9 | 25 | AD-960475.1 | | |
| | 26 | | | |
| | 27 | | | |
| 10 | 28 | AD-960442.1 | | |
| | 29 | | | |
| | 30 | | | |
| 11 | 31 | AD-960470.1 | | |
| | 32 | | | |
| | 33 | | | |
| 12 | 34 | AD-960446.1 | | |
| | 35 | | | |
| | 36 | | | |
| 13 | 37 | AD-960436.1 | | |
| | 38 | | | |
| | 39 | | | |
| 14 | 40 | AD-960443.1 | | |
| | 41 | | | |
| | 42 | | | |
| 15 | 43 | AD-960063.1 | | |
| | 44 | | | |
| | 45 | | | |
| 16 | 46 | AD-960031.1 | | |
| | 47 | | | |
| | 48 | | | |
| 17 | 49 | AD-959910.1 | | |
| | 50 | | | |
| | 51 | | | |
| 18 | 52 | AD-960096.1 | | |
| | 53 | | | |
| | 54 | | | |
| 19 | 55 | AD-959918.1 | | |
| | 56 | | | |
| | 57 | | | |
| 20 | 58 | AD-80794.7 | | |
| | 59 | | | |
| | 60 | | | |

TABLE 9
Duplexes of Interest

| | Range in NM- |
|---|---|
| Duplex ID | 000040.3 |
| AD-959917.1 | 243-265 |
| AD-960064.1 | 433-455 |
| AD-960031.1 | 431-453 |
| AD-960063.1 | 431-453 |
| AD-960293.1 | 243-265 |
| AD-960288.1 | 238-260 |
| AD-960445.1 | 435-457 |
| AD-960292.1 | 242-264 |
| AD-960475.1 | 504-526 |
| AD-960442.1 | 432-454 |
| AD-960470.1 | 499-521 |
| AD-960436.1 | 426-448 |
| AD-960446.1 | 436-458 |
| AD-960474.1 | 503-525 |
| AD-960294.1 | 244-266 |
| AD-960443.1 | 433-455 |
| AD-80794.7 | 430-450 |
| AD-959910.1 | 235-257 |

TABLE 10

| | D14 | | | |
|---|---|---|---|---|
| | Liver RTqPCR | | | |
| | % Message | | ELISA | |
| Duplex | Remaining | SD | Avg | SEM |
| PBS | 100.56 | 10.81 | 173.05 | 34.36 |
| Naïve | 105.57 | 1.84 | 125.40 | 46.86 |
| AD-959917.1 | 38.42 | 16.51 | 63.57 | 13.65 |
| AD-960064.1 | 16.01 | 2.36 | 36.97 | 15.66 |
| AD-960293.1 | 60.82 | 17.10 | 119.00 | 12.04 |
| AD-960288.1 | 75.24 | 14.48 | 99.64 | 12.46 |
| AD-960445.1 | 19.60 | 7.46 | 61.84 | 1.26 |
| AD-960292.1 | 91.68 | 22.51 | 78.59 | 3.24 |
| AD-960475.1 | 61.18 | 20.12 | 73.65 | 14.56 |
| AD-960442.1 | 55.63 | 17.52 | 91.45 | 8.10 |
| AD-960470.1 | 31.48 | 9.94 | 87.10 | 13.53 |
| AD-960446.1 | 34.44 | 5.34 | 62.84 | 11.40 |
| AD-960436.1 | 35.50 | 9.98 | 68.61 | 17.47 |
| AD-960443.1 | 60.00 | 3.61 | 88.72 | 8.31 |
| AD-960063.1 | 14.64 | 7.30 | 42.19 | 2.84 |
| AD-960031.1 | 11.45 | 5.18 | 20.57 | 5.87 |
| AD-959910.1 | 67.13 | 13.87 | 59.45 | 0.75 |
| AD-960096.1 | 22.96 | 8.58 | 13.15 | 3.40 |
| AD-959918.1 | 76.69 | 7.97 | 51.37 | 3.33 |
| AD-80794.7 | 23.00 | 15.59 | 17.38 | 3.01 |

[0775] Additional duplexes of interest, identified from the above in vitro studies, were also evaluated in vivo. In particular, at pre-dose day −14 wild-type mice (C57BL/6) were transduced by retroorbital administration of 2×10¹⁰ viral particles of an adeno-associated virus 8 (AAV8) vector encoding human APOC3. In particular, mice were administered an AAV8 encoding the human APOC3 mRNA, referred to as AAV8-TBG-PI-APOC3.

[0776] At day 0, groups of three mice were subcutaneously administered a single 3 mg/kg dose of the agents of interest or PBS control. Table 11 provides the treatment groups and Table 12 provides the modified nucleotide sequences of the sense and antisense strands of the duplexes of interest. At day 7 or day 14 post-dose animals were sacrificed, liver samples were collected and snap-frozen in liquid nitrogen. Liver mRNA was extracted and analyzed by the RT-QPCR method.

[0777] Human APOC3 mRNA levels were compared to a housekeeping gene, GAPDH. The values were then normalized to the average of PBS vehicle control group. The data were expressed as percent of baseline value, and presented as mean plus standard deviation. The results, listed in Table 13 and shown in FIG. 2, demonstrate that the exemplary duplex agents tested effectively reduce the level of the human APOC3 messenger RNA in vivo.

TABLE 11
Treatment Groups

| Group | Animal | | | |
|---|---|---|---|---|
| # | # | Treatment | Dose | Timepoint |
| 1 | 1 | PBS | n/a | D0, D7, |
| | 2 | | | D14 |
| | 3 | | | |
| 2 | 4 | Naïve | n/a | |
| | 5 | | | |
| | 6 | | | |
| 3 | 7 | AD-80794 | 3 mpk | |
| | 8 | | | |
| | 9 | | | |
| 4 | 10 | AD-959907 | | |
| | 11 | | | |
| | 12 | | | |
| 5 | 13 | AD-959914 | | |
| | 14 | | | |
| | 15 | | | |
| 6 | 16 | AD-959916 | | |
| | 17 | | | |
| | 18 | | | |
| 7 | 19 | AD-959932 | | |
| | 20 | | | |
| | 21 | | | |
| 8 | 22 | AD-959941 | | |
| | 23 | | | |
| | 24 | | | |
| 9 | 25 | AD-960030 | | |
| | 26 | | | |
| | 27 | | | |
| 10 | 28 | AD-960062 | | |
| | 29 | | | |
| | 30 | | | |
| 11 | 31 | AD-960064 | | |
| | 32 | | | |
| | 33 | | | |
| 12 | 34 | AD-960065 | | |
| | 35 | | | |
| | 36 | | | |
| 13 | 37 | AD-960066 | | |
| | 38 | | | |
| | 39 | | | |
| 14 | 40 | AD-960294 | | |
| | 41 | | | |
| | 42 | | | |
| 15 | 43 | AD-960314 | | |
| | 44 | | | |
| | 45 | | | |
| 16 | 46 | AD-960471 | | |
| | 47 | | | |
| | 48 | | | |
| 17 | 49 | AD-960474 | | |
| | 50 | | | |
| | 51 | | | |
| 18 | 52 | AD-960478 | | |
| | 53 | | | |
| | 54 | | | |
| 19 | 55 | AD-960481 | | |
| | 56 | | | |
| | 57 | | | |

TABLE 12
Additional Duplexes of Interest

| | Range in NM- |
|---|---|
| Duplex ID | 000040.3 |
| AD-80794.8 | 430-450 |
| AD-959907.2 | 232-254 |
| AD-959914.2 | 239-261 |
| AD-959916.2 | 242-264 |
| AD-959932.2 | 258-280 |
| AD-960314.2 | 264-286 |
| AD-959941.2 | 268-290 |
| AD-960030.2 | 429-451 |
| AD-960062.2 | 430-452 |
| AD-960064.2 | 433-455 |
| AD-960065.2 | 434-456 |
| AD-960066.2 | 435-457 |
| AD-960294.2 | 244-266 |
| AD-960471.2 | 500-522 |
| AD-960474.2 | 503-525 |
| AD-960478.2 | 507-529 |
| AD-960481.2 | 510-532 |

TABLE 13

| | % Message | |
|---|---|---|
| Duplex | Remaining | SD |
| PBS | 102.94 | 34.16 |
| Naïve | 97.12 | 15.32 |
| AD-80794 | 15.17 | 8.74 |
| AD-959907 | 49.60 | 35.60 |
| AD-959914 | 75.84 | 20.55 |
| AD-959916 | 51.81 | 27.99 |
| AD-959932 | 62.36 | 13.32 |
| AD-959941 | 55.60 | 17.44 |
| AD-960030 | 10.26 | 2.93 |
| AD-960062 | 24.91 | 9.81 |
| AD-960064 | 20.04 | 8.94 |
| AD-960065 | 38.62 | 18.89 |
| AD-960066 | 20.93 | 5.78 |
| AD-960294 | 73.30 | 24.03 |
| AD-960314 | 48.32 | 31.10 |
| AD-960471 | 39.24 | 28.51 |
| AD-960474 | 30.81 | 15.15 |
| AD-960478 | 47.27 | 7.36 |
| AD-960481 | 37.22 | 9.27 |

### Example 4. Structure-Activity Relationship Analyses

[0778] Based on the in vitro analyses in Example 2 and the in vivo analyses in Example 4, structure-active relationship (SAR) analyses were performed. In particular, additional duplexes were designed, synthesized, and assayed in vitro and in vivo. The additional agents were designed to target within nucleotides 429-455 or nucleotides 504-532 of NM_000040.3.

[0779] siRNAs were synthesized and annealed using routine methods known in the art and described above.

[0780] Detailed lists of the unmodified APOC3 sense and antisense strand nucleotide sequences are shown in Table 14. Detailed lists of the modified apolipoprotein C3 sense and antisense strand nucleotide sequences are shown in Table 15.

[0781] For free uptake, experiments were performed by adding 2.5 μl of siRNA duplexes in PBS per well into a 96 well plate. Complete growth media (47.5 μl) containing about 1.5×10⁴ Hep3B cells was then added to the siRNA. Cells were incubated for 48 hours prior to RNA purification and RT-qPCR, as described above. Single dose experiments were performed at 500 nM, 100 nM, 10 nM, and 1 nM final duplex concentration.

[0782] For transfections, Hep3b cells (ATCC, Manassas, VA) were grown to near confluence at 37° C. in an atmosphere of 5% CO₂ in Eagle's Minimum Essential Medium (Gibco) supplemented with 10% FBS (ATCC) before being released from the plate by trypsinization. Transfection was carried out by adding 7.5 μl of Opti-MEM plus 0.1 μl of Lipofectamine RNAiMax per well (Invitrogen, Carlsbad CA. cat #13778-150) to 2.5 μl of each siRNA duplex to an individual well in a 384-well plate. The mixture was then incubated at room temperature for 15 minutes. Forty I of complete growth media without antibiotic containing ˜1.5×10⁴ Hep3B cells were then added to the siRNA mixture. Cells were incubated for 24 hours prior to RNA purification. Single dose experiments were performed at 50, nM, 10 nM, 1 nM, and 0.1 nM final duplex concentration.

[0783] Total RNA isolation was performed using DYNABEADS. Briefly, cells were lysed in 10 μl of Lysis/Binding Buffer containing 3 μL of beads per well and mixed for 10 minutes on an electrostatic shaker. The washing steps were automated on a Biotek EL406, using a magnetic plate support. Beads were washed (in 3 μL) once in Buffer A, once in Buffer B, and twice in Buffer E, with aspiration steps in between. Following a final aspiration, complete 12 μL RT mixture was added to each well, as described below.

[0784] For cDNA synthesis, a master mix of 1.5 μl 10× Buffer, 0.6 μl 10× dNTPs, 1.5 μl Random primers, 0.75 μl Reverse Transcriptase, 0.75 μl RNase inhibitor and 9.9 μl of H₂O per reaction were added per well. Plates were sealed, agitated for 10 minutes on an electrostatic shaker, and then incubated at 37 degrees C. for 2 hours. Following this, the plates were agitated at 80 degrees C. for 8 minutes.

[0785] RT-qPCR was performed as described above and relative fold change was calculated as described above.

[0786] The results of the free uptake experiments of the dsRNA agents listed in Tables 14 and 15 are shown in Table 16 and the results of the transfection assays of the dsRNA agents listed in Tables 14 and 15 in Hep3B cells are shown in Table 17.

TABLE 14
Unmodified Sense and Antisense Strand Sequences of Apolipoprotein C3 dsRNA Agents

| | | SEQ | | | SEQ | |
|---|---|---|---|---|---|---|
| | | ID | Range in | | ID | Range in |
| Duplex Name | Sense Sequence 5′ to 3′ | NO: | NM_000040.3 | Antisense Sequence 5′ to 3′ | NO: | NM_000040.3 |
| AD-80794.10 | CUUAAAAGGGACAGUAUUCUA | 13 | 434-452 | UAGAAUACUGUCCCUUUUAAGCA | 58 | 432-452 |
| AD-1143240.1 | CUUAAAAGGGACAGUAUUCUA | 13 | 434-452 | UAGAAUACUGUCCCUUUUAAGCA | 58 | 432-452 |
| AD-1143241.1 | CUUAAAAGGGACAGUAUUCUA | 13 | 434-452 | UAGAAUACUGUCCCUUUUAAGCA | 58 | 432-452 |
| AD-1143242.1 | CUUAAAAGGGACAGUAUUCUA | 13 | 434-452 | UAGAAUACUGUCCCUUUUAAGCC | 14 | 432-452 |
| AD-1143243.1 | CUUAAAAGGGACAGUAUUCUA | 13 | 434-452 | UAGAAUACUGUCCCUUUUAAGCC | 14 | 432-452 |
| AD-1143244.1 | UAAAAGGGACAGUAUUCUA | 299 | 434-452 | UAGAAUACUGUCCCUUUUAAG | 300 | 432-452 |
| AD-1143245.1 | UAAAAGGGACAGUAUUCUA | 299 | 434-452 | UAGAAUACUGUCCCUUUUAAG | 300 | 432-452 |
| AD-1143246.1 | CUUAAAAGGGACAGUAUUCUA | 13 | 432-452 | UAGAAUACUGUCCCUUUUAAGCC | 14 | 430-452 |
| AD-1143247.1 | CUUAAAAGGGACAGUAUUCUA | 13 | 432-452 | UAGAAUACUGUCCCUUUUAAGCC | 14 | 430-452 |
| AD-1143248.1 | CUUAAAAGGGACAGUAUUCUA | 13 | 432-452 | UAGAAUACUGUCCCUUUUAAGCC | 14 | 430-452 |
| AD-1143249.1 | CUUAAAAGGGACAGUAUUCUA | 13 | 432-452 | UAGAAUACUGUCCCUUUUAAGCC | 14 | 430-452 |
| AD-960030.3 | GCUUAAAAGGGACAGUAUUCU | 56 | 431-451 | AGAAUACUGUCCCUUUUAAGCAA | 57 | 429-451 |
| AD-1143250.1 | GCUUAAAAGGGACAGUAUUCU | 56 | 431-451 | AGAAUACUGUCCCUUUUAAGCAA | 57 | 429-451 |
| AD-1143251.1 | GCUUAAAAGGGACAGUAUUCU | 56 | 431-451 | AGAAUACUGUCCCUUUUAAGCAA | 57 | 429-451 |
| AD-1143252.1 | GCUUAAAAGGGACAGUAUUCU | 56 | 431-451 | AGAATACUGUCCCUUUUAAGCAA | 301 | 429-451 |
| AD-1143253.1 | GCUUAAAAGGGACAGUAUUCU | 56 | 431-451 | AGAAUACUGUCCCUUUUAAGCGC | 302 | 429-451 |
| AD-1143254.1 | GCUUAAAAGGGACAGUAUUCU | 56 | 431-451 | AGAATACUGUCCCUUUUAAGCGC | 303 | 429-451 |
| AD-1143255.1 | UUAAAAGGGACAGUAUUCU | 304 | 433-451 | AGAAUACUGUCCCUUUUAAGC | 305 | 431-451 |
| AD-1143256.1 | UUAAAAGGGACAGUAUUCU | 304 | 433-451 | AGAATACUGUCCCUUUUAAGC | 306 | 431-451 |
| AD-1143257.1 | GCUUAAAAGGGACAGUAUUCU | 56 | 431-451 | AGAAUACUGUCCCUUUUAAGCGC | 302 | 429-451 |
| AD-1143258.1 | GCUUAAAAGGGACAGUAUUCU | 56 | 431-451 | AGAATACUGUCCCUUUUAAGCGC | 303 | 429-451 |
| AD-1143259.1 | GCUUAAAAGGGACAGUAUUCU | 56 | 431-451 | AGAAUACUGUCCCUUUUAAGCGC | 302 | 429-451 |
| AD-1143260.1 | GCUUAAAAGGGACAGUAUUCU | 56 | 431-451 | AGAATACUGUCCCUUUUAAGCGC | 303 | 429-451 |
| AD-960031.3 | UAAAAGGGACAGUAUUCUCAU | 36 | 434-454 | AUGAGAAUACUGUCCCUUUUAAG | 37 | 432-454 |
| AD-1143261.1 | UAAAAGGGACAGUAUUUUCAU | 307 | 434-454 | AUGAAAAUACUGUCCCUUUUAAG | 308 | 432-454 |
| AD-1143262.1 | UAAAAGGGACAGUAUUCUCAU | 36 | 434-454 | AUGAGAAUACUGUCCCUUUUAAG | 37 | 432-454 |
| AD-1143263.1 | UAAAAGGGACAGUAUUCUCAU | 36 | 434-454 | AUGAGAAUACUGUCCCUUUUAAG | 37 | 432-454 |
| AD-1143264.1 | UAAAAGGGACAGUAUUCUCAU | 36 | 434-454 | AUGAGAAUACUGUCCCUUUUACC | 309 | 432-454 |
| AD-1143265.1 | UAAAAGGGACAGUAUUCUCAU | 36 | 434-454 | AUGAGAAUACUGUCCCUUUUACC | 309 | 432-454 |
| AD-1143266.1 | AAAGGGACAGUAUUCUCAU | 310 | 436-454 | AUGAGAAUACUGUCCCUUUUG | 311 | 434-454 |
| AD-1143267.1 | AAAGGGACAGUAUUCUCAU | 310 | 436-454 | AUGAGAAUACUGUCCCUUUUG | 311 | 434-454 |
| AD-1143268.1 | UAAAAGGGACAGUAUUCUCAU | 36 | 434-454 | AUGAGAAUACUGUCCCUUUUACC | 309 | 432-454 |
| AD-1143269.1 | AAAAAGGGACAGUAUUCUCAU | 312 | 434-454 | AUGAGAAUACUGUCCCUUUUGCC | 313 | 432-454 |
| AD-1143270.1 | UAAAAGGGACAGUAUUCUCAU | 36 | 434-454 | AUGAGAAUACUGUCCCUUUUACC | 309 | 432-454 |
| AD-1143271.1 | UAAAAGGGACAGTAUUCUCAU | 314 | 434-454 | AUGAGAAUACUGUCCCUUUUACC | 309 | 432-454 |
| AD-1143272.1 | UAAAAGGGACAGTAUUCUCAU | 314 | 434-454 | AUGAGAAUACUGUCCCUUUUACC | 309 | 432-454 |
| AD-1143273.1 | UAAAAGGGACAGUAUUCUCAU | 36 | 434-454 | AUGAGAAUACUGUCCCUUUUAAG | 37 | 432-454 |
| AD-1143274.1 | UAAAAGGGACAGTAUUCUCAU | 314 | 434-454 | AUGAGAAUACUGUCCCUUUUAAG | 37 | 432-454 |
| AD-960062.3 | CUUAAAAGGGACAGUAUUCUU | 48 | 432-452 | AAGAAUACUGUCCCUUUUAAGCA | 49 | 430-452 |
| AD-1143275.1 | CUUAAAAGGGACAGUAUUCUU | 48 | 432-452 | AAGAAUACUGUCCCUUUUAAGCA | 49 | 430-452 |
| AD-1143276.1 | CUUAAAAGGGACAGUAUUCUU | 48 | 432-452 | AAGAAUACUGUCCCUUUUAAGCA | 49 | 430-452 |
| AD-1143277.1 | CUUAAAAGGGACAGUAUUCUU | 48 | 432-452 | AAGAAUACUGUCCCUUUUAAGCC | 315 | 430-452 |
| AD-1143278.1 | CUUAAAAGGGACAGUAUUCUU | 48 | 432-452 | AAGAAUACUGUCCCUUUUAAGCC | 315 | 430-452 |
| AD-1143279.1 | UAAAAGGGACAGUAUUCUU | 316 | 434-452 | AAGAAUACUGUCCCUUUUAAG | 317 | 432-452 |
| AD-1143280.1 | UAAAAGGGACAGUAUUCUU | 316 | 434-452 | AAGAAUACUGUCCCUUUUAAG | 317 | 432-452 |
| AD-1143281.1 | CUUAAAAGGGACAGUAUUCUU | 48 | 432-452 | AAGAAUACUGUCCCUUUUAAGCC | 315 | 430-452 |
| AD-1143282.1 | CUUAAAAGGGACAGUAUUCUU | 48 | 432-452 | AAGAAUACUGUCCCUUUUAAGCC | 315 | 430-452 |
| AD-1143283.1 | CUUAAAAGGGACAGUAUUCUU | 48 | 432-452 | AAGAAUACUGUCCCUUUUAAGCC | 315 | 430-452 |
| AD-1143284.1 | CUUAAAAGGGACAGUAUUCUU | 48 | 432-452 | AAGAAUACUGUCCCUUUUAAGCC | 315 | 430-452 |
| AD-960064.3 | AAAAGGGACAGUAUUCUCAGU | 30 | 435-455 | ACUGAGAAUACUGUCCCUUUUAA | 31 | 433-455 |
| AD-1143285.1 | AAAAGGGACAGUAUUCUCAGU | 30 | 435-455 | ACUGAGAAUACUGUCCCUUUUAA | 31 | 433-455 |
| AD-1143286.1 | AAAAGGGACAGUAUUCUCAGU | 30 | 435-455 | ACUGAGAAUACUGUCCCUUUUAA | 31 | 433-455 |
| AD-1143287.1 | AAAAGGGACAGUAUUCUCAGU | 30 | 435-455 | ACUGAGAAUACUGUCCCUUUUGC | 318 | 433-455 |
| AD-1143288.1 | AAAAGGGACAGUAUUCUCAGU | 30 | 435-455 | ACUGAGAAUACUGUCCCUUUUCC | 319 | 433-455 |
| AD-1143289.1 | AAGGGACAGUAUUCUCAGU | 320 | 437-455 | ACUGAGAAUACUGUCCCUUUU | 321 | 435-455 |
| AD-1143290.1 | AAAAGGGACAGUAUUCUCAGU | 30 | 435-455 | ACUGAGAAUACUGUCCCUUUUGC | 318 | 433-455 |
| AD-1143291.1 | AAAAGGGACAGUAUUCUCAGU | 30 | 435-455 | ACUGAGAAUACUGUCCCUUUUCC | 319 | 433-455 |
| AD-1143292.1 | AAAAGGGACAGUAUUUUCAGU | 322 | 435-455 | ACUGAAAAUACUGUCCCUUUUGC | 323 | 433-455 |
| AD-1143293.1 | AAAAGGGACAGUAUUCUCAGU | 30 | 435-455 | ACUGAGAAUACUGUCCCUUUUGC | 318 | 433-455 |
| AD-1143294.1 | AAAAGGGACAGUAUUCUCAGU | 30 | 435-455 | ACUGAGAAUACUGUCCCUUUUCC | 319 | 433-455 |
| AD-1143295.1 | AAAAGGGACAGUAUUCUCAGU | 30 | 435-455 | ACUGAGAAUACUGUCCCUUUUGC | 318 | 433-455 |
| AD-1143296.1 | AAAAGGGACAGUAUUCUCAGU | 30 | 435-455 | ACUGAGAAUACUGUCCCUUUUCC | 319 | 433-455 |
| AD-960096.3 | CCAAUAAAGCUGGACAAGAAU | 28 | 506-526 | AUUCUUGUCCAGCUUUAUUGGGA | 29 | 504-526 |
| AD-1143297.1 | CCAAUAAAGCUGGAUAAGAAU | 324 | 506-526 | AUUCUUAUCCAGCUUUAUUGGGA | 325 | 504-526 |
| AD-1143298.1 | CCAAUAAAGCUGGACAAGAAU | 28 | 506-526 | AUUCTUGUCCAGCUUUAUUGGGA | 326 | 504-526 |
| AD-1143299.1 | CCAAUAAAGCUGGACAAGAAU | 28 | 506-526 | AUUCTUGUCCAGCUUUAUUGGGC | 327 | 504-526 |
| AD-1143300.1 | AAUAAAGCUGGACAAGAAU | 328 | 508-526 | AUUCTUGUCCAGCUUUAUUGG | 329 | 506-526 |
| AD-1143301.1 | AAUAAAGCUGGACAAGAAU | 328 | 508-526 | AUUCTUGUCCAGCUUUAUUCC | 330 | 506-526 |
| AD-1143302.1 | CCAAUAAAGCUGGACAAGAAU | 28 | 506-526 | AUUCTUGUCCAGCUUUAUUGGGC | 327 | 504-526 |
| AD-1143303.1 | CCAAUAAAGCUGGACAAGAAU | 28 | 506-526 | AUUCTUGUCCAGCUUUAUUGG | 329 | 506-526 |
| AD-1143304.1 | CCAAUAAAGCUGGACAAGAAU | 28 | 506-526 | AUUCTUGUCCAGCUUUAUUGGGC | 327 | 504-526 |
| AD-1143305.1 | CCAAUAAAGCUGGACAAGAAU | 28 | 506-526 | AUUCTUGUCCAGCUUUAUUGG | 329 | 506-526 |
| AD-1143306.1 | CCAAUAAAGCUGGACAAGAAU | 28 | 506-526 | AUUCUUGUCCAGCUUUAUUGGGA | 29 | 504-526 |
| AD-1143307.1 | CCAAUAAAGCUGGACAAGAAU | 28 | 506-526 | AUUCUUGUCCAGCUUUAUUGGGA | 29 | 504-526 |
| AD-960481.3 | AAGCUGGACAAGAAGCUGCUU | 99 | 512-532 | AAGCAGCUUCUUGUCCAGCUUUA | 100 | 510-532 |
| AD-1143308.1 | AAGCUGGACAAGAAGCUGCUU | 99 | 512-532 | AAGCAGCUUCUUGUCCAGCUUUA | 100 | 510-532 |
| AD-1143309.1 | AAGCUGGACAAGAAGCUGCUU | 99 | 512-532 | AAGCAGCUUCUUGUCCAGCUUUA | 100 | 510-532 |
| AD-1143310.1 | AAGCUGGACAAGAAGCUGCUU | 99 | 512-532 | AAGCAGCUUCUUGUCCAGCUUUA | 100 | 510-532 |
| AD-1143311.1 | AAGCUGGACAAGAAGCUGCUU | 99 | 512-532 | AAGCAGCUUCUUGUCCAGCUUUC | 331 | 510-532 |
| AD-1143312.1 | AAGCUGGACAAGAAGCUGCUU | 99 | 512-532 | AAGCAGCUUCUUGUCCAGCUUUC | 331 | 510-532 |
| AD-1143313.1 | AAGCUGGACAAGAAGCUGCUU | 99 | 512-532 | AAGCAGCUUCUUGUCCAGCUUCC | 332 | 510-532 |
| AD-1143314.1 | AAGCUGGACAAGAAGCUGCUU | 99 | 512-532 | AAGCAGCUUCUUGUCCAGCUUCC | 332 | 510-532 |
| AD-1143315.1 | GCUGGACAAGAAGCUGCUU | 333 | 514-532 | AAGCAGCUUCUUGUCCAGCUU | 334 | 512-532 |
| AD-1143316.1 | GCUGGACAAGAAGCUGCUU | 333 | 514-532 | AAGCAGCUUCUUGUCCAGCUU | 334 | 512-532 |
| AD-1143317.1 | AAGCUGGACAAGAAGCUGCUU | 99 | 512-532 | AAGCAGCUUCUUGUCCAGCUUCC | 332 | 510-532 |
| AD-1143318.1 | AAGCUGGACAAGAAGCUGCUU | 99 | 512-532 | AAGCAGCUUCUUGUCCAGCUUCC | 332 | 510-532 |
| AD-1143319.1 | AAGCUGGACAAGAAGCUGCUU | 99 | 512-532 | AAGCAGCUUCUUGUCCAGCUUCC | 332 | 510-532 |
| AD-1143320.1 | AAGCUGGACAAGAAGCUGCUU | 99 | 512-532 | AAGCAGCUUCUUGUCCAGCUUCC | 332 | 510-532 |
| AD-1143321.1 | AAGCUGGACAAGAAGCUACUU | 335 | 512-532 | AAGUAGCUUCUUGUCCAGCUUCC | 336 | 510-532 |
| AD-1143322.1 | AAGCUGGACAAGAAGUUGCUU | 337 | 512-532 | AAGCAACUUCUUGUCCAGCUUCC | 338 | 510-532 |
| AD-1183925 | AAGCUGGACAAGAAGCUGCUU | 99 | 512-532 | AAGCAGCUUCUUGUCCAGCUUUC | 331 | 510-532 |
| AD-1183926 | GCUGGACAAGAAGCUGCUU | 333 | 514-532 | AAGCAGCUUCUUGUCCAGCUU | 334 | 512-532 |
| AD-1019001 | ACGGGACAGUAUUCUCAGUA | 339 | 437-456 | UCACUGAGAAUACUGUCCCGU | 340 | 437-457 |

TABLE 15
Modified Sense and Antisense Strand Sequences of Apolipoprotein C3 dsRNA Agents

| Duplex Name | Sense Sequence 5′ to 3′ | SEQ ID NO: | Antisense Sequence 5′ to 3′ | SEQ ID NO: | mRNA target sequence | SEQ ID NO: |
|---|---|---|---|---|---|---|
| AD-80794.10 | csusuaaaAfgGfGfAfcaguauucuaL96 | 17 | usAfsgaaUfaCfUfguccCfuUftmaagscsa | 392 | CUUAAAAGGGACAGUAUUCUC | 828 |
| AD-1143240.1 | csusuaaaAfgGfGfAfcaguauucuaL96 | 17 | usAfsgaaUfacuguccCfuUfuuaagscsa | 829 | CUUAAAAGGGACAGUAUUCUC | 828 |
| AD-1143241.1 | csusuaaaAfgGfGfAfcaguauucuaL96 | 17 | usdAsgaaUfacuguccCfuUfuuaagscsa | 830 | CUUAAAAGGGACAGUAUUCUC | 828 |
| AD-1143242.1 | csusuaaaAfgGfGfAfcaguauucuaL96 | 17 | usAfsgaaUfacuguccCfuUfuuaagscsc | 831 | CUUAAAAGGGACAGUAUUCUC | 828 |
| AD-1143243.1 | csusuaaaAfgGfGfAfcaguauucuaL96 | 17 | usdAsgadAudAcuguccCfuUTuuaagscsc | 16 | CUUAAAAGGGACAGUAUUCUC | 828 |
| AD-1143244.1 | usasaaAfgGfGfAfcaguauucuaL96 | 832 | usAfsgaaUfacuguccCfuUfuuasasg | 833 | CUUAAAAGGGACAGUAUUCUC | 828 |
| AD-1143245.1 | usasaaAfgGfGfAfcaguauucuaL96 | 832 | usdAsgadAudAcuguccCfuUTuuasasg | 834 | CUUAAAAGGGACAGUAUUCUC | 828 |
| AD-1143246.1 | csusuaaaagdGgdAcaguauucuaL96 | 835 | usAfsgaaUfacuguccCfuUfuuaagscsc | 831 | UGCUUAAAAGGGACAGUAUUCUC | 379 |
| AD-1143247.1 | csusuaaaagdGgdAcaguauucuaL96 | 835 | usdAsgadAudAcuguccCfuUTuuaagscsc | 16 | UGCUUAAAAGGGACAGUAUUCUC | 379 |
| AD-1143248.1 | csusuaaaagdGgdACfaguauucuaL96 | 836 | usAfsgaaUfacuguccCfuUfuuaagscsc | 831 | UGCUUAAAAGGGACAGUAUUCUC | 379 |
| AD-1143249.1 | csusuaaaagdGgdACfaguauucuaL96 | 836 | usdAsgadAudAcuguccCfuUTuuaagscsc | 16 | UGCUUAAAAGGGACAGUAUUCUC | 379 |
| AD-960030.3 | gscsuuaaAfaGfGfGfacaguauucuL96 | 389 | asGfsaauAfcUfGfucccUfuUfuaagcsasa | 390 | UUGCUUAAAAGGGACAGUAUUCU | 391 |
| AD-1143250.1 | gscsuuaaAfaGfGfGfacaguauucuL96 | 389 | asGfsaauAfcugucccUfuUfuaagcsasa | 837 | UUGCUUAAAAGGGACAGUAUUCU | 391 |
| AD-1143251.1 | gscsuuaaAfaGfGfGfacaguauucuL96 | 389 | asdGsaauAfcugucccUfuUfuaagcsasa | 838 | UUGCUUAAAAGGGACAGUAUUCU | 391 |
| AD-1143252.1 | gscsuuaaAfaGfGfGfacaguauucuL96 | 389 | asdGsaadTadCugucccUfuUfuaagcsasa | 839 | UUGCUUAAAAGGGACAGUAUUCU | 391 |
| AD-1143253.1 | gscsuuaaAfaGfGfGfacaguauucuL96 | 389 | asdGsaauAfcugucccUfuUfuaagcsgsc | 840 | UUGCUUAAAAGGGACAGUAUUCU | 391 |
| AD-1143254.1 | gscsuuaaAfaGfGfGfacaguauucuL96 | 389 | asdGsaadTadCugucccUfuUfuaagcsgsc | 841 | UUGCUUAAAAGGGACAGUAUUCU | 391 |
| AD-1143255.1 | ususaaAfaGfGfGfacaguauucuL96 | 842 | asdGsaauAfcugucccUfuUfuaasgsc | 843 | GCUUAAAAGGGACAGUAUUCU | 844 |
| AD-1143256.1 | ususaaAfaGfGfGfacaguauucuL96 | 842 | asdGsaadTadCugucccUfuUfuaasgsc | 845 | GCUUAAAAGGGACAGUAUUCU | 844 |
| AD-1143257.1 | gscsuuaaaadGgdGacaguauucuL96 | 846 | asdGsaauAfcugucccUfuUfuaagcsgsc | 840 | UUGCUUAAAAGGGACAGUAUUCU | 391 |
| AD-1143258.1 | gscsuuaaaadGgdGacaguauucuL96 | 846 | asdGsaadTadCugucccUfuUfuaagcsgsc | 841 | UUGCUUAAAAGGGACAGUAUUCU | 391 |
| AD-1143259.1 | gscsuuaaaadGgdGadCaguauucuL96 | 847 | asdGsaauAfcugucccUfuUfuaagcsgsc | 840 | UUGCUUAAAAGGGACAGUAUUCU | 391 |
| AD-1143260.1 | gscsuuaaaadGgdGadCaguauucuL96 | 847 | asdGsaadTadCugucccUfuUfuaagcsgsc | 841 | UUGCUUAAAAGGGACAGUAUUCU | 391 |
| AD-960031.3 | usasaaagGfgAfCfAfguauucucauL96 | 359 | asUfsgagAfaUfAfcuguCfcCfuuuuasasg | 360 | CUUAAAAGGGACAGUAUUCUCAG | 361 |
| AD-1143261.1 | usasaaagGfgAfCfAfguauuuucauL96 | 848 | asUfsgaaAfaUfAfcuguCfcCfuuuuasasg | 849 | CUUAAAAGGGACAGUAUUCUCAG | 361 |
| AD-1143262.1 | usasaaagGfgAfCfAfguauucucauL96 | 359 | asUfsgadGa(Agn)uacuguCfcCfuuuuasasg | 850 | CUUAAAAGGGACAGUAUUCUCAG | 361 |
| AD-1143263.1 | usasaaagGfgAfCfAfguauucucauL96 | 359 | asUfsgadGa(A2p)uacuguCfcCfuuuuasasg | 851 | CUUAAAAGGGACAGUAUUCUCAG | 361 |
| AD-1143264.1 | usasaaagGfgAfCfAfguauucucauL96 | 359 | asUfsgadGa(Agn)uacuguCfcCfuuuuascsc | 852 | CUUAAAAGGGACAGUAUUCUCAG | 361 |
| AD-1143265.1 | usasaaagGfgAfCfAfguauucucauL96 | 359 | asUfsgadGa(A2p)uacuguCfcCfuuuuascsc | 853 | CUUAAAAGGGACAGUAUUCUCAG | 361 |
| AD-1143266.1 | asasagGfgAfCfAfguauucucauL96 | 854 | asUfsgadGa(Agn)uacuguCfcCfuuususg | 855 | UAAAAGGGACAGUAUUCUCAG | 856 |
| AD-1143267.1 | asasagGfgAfCfAfguauucucauL96 | 854 | asUfsgadGa(A2p)uacuguCfcCfuuususg | 857 | UAAAAGGGACAGUAUUCUCAG | 856 |
| AD-1143268.1 | usasaaagggdAcdAguauucucauL96 | 858 | asUfsgadGa(Agn)uacuguCfcCfuuuuascsc | 852 | CUUAAAAGGGACAGUAUUCUCAG | 361 |
| AD-1143269.1 | asasaaagggdAcdAguauucucauL96 | 859 | asUfsgadGa(Agn)uacuguCfcCfuuuugscsc | 860 | CUUAAAAGGGACAGUAUUCUCAG | 361 |
| AD-1143270.1 | usasaaagggdAcdAguauucucauL96 | 858 | asUfsgadGa(A2p)uacuguCfcCfuuuuascsc | 853 | CUUAAAAGGGACAGUAUUCUCAG | 361 |
| AD-1143271.1 | usasaaagggdAcdAgdTauucucauL96 | 861 | asUfsgadGa(Agn)uacuguCfcCfuuuuascsc | 852 | CUUAAAAGGGACAGUAUUCUCAG | 361 |
| AD-1143272.1 | usasaaagggdAcdAgdTauucucauL96 | 861 | asUfsgadGa(A2p)uacuguCfcCfuuuuascsc | 853 | CUUAAAAGGGACAGUAUUCUCAG | 361 |
| AD-1143273.1 | usasaaagggdAcdAguauucucauL96 | 858 | asUfsgadGadAuacuguCfcCfuuuuasasg | 862 | CUUAAAAGGGACAGUAUUCUCAG | 361 |
| AD-1143274.1 | usasaaagggdAcdAgdTauucucauL96 | 861 | asUfsgadGadAuacuguCfcCfuuuuasasg | 862 | CUUAAAAGGGACAGUAUUCUCAG | 361 |
| AD-960062.3 | csusuaaaAfgGfGfAfcaguauucuuL96 | 377 | asAfsgaaUfaCfUfguccCfuUfuuaagscsa | 378 | UGCUUAAAAGGGACAGUAUUCUC | 379 |
| AD-1143275.1 | csusuaaaAfgGfGfAfcaguauucuuL96 | 377 | asAfsgaaUfacuguccCfutiuuaagscsa | 863 | UGCUUAAAAGGGACAGUAUUCUC | 379 |
| AD-1143276.1 | csusuaaaAfgGfGfAfcaguauucuuL96 | 377 | asdAsgaaUfacuguccCfuUfuuaagscsa | 864 | UGCUUAAAAGGGACAGUAUUCUC | 379 |
| AD-1143277.1 | csusuaaaAfgGfGfAfcaguauucuuL96 | 377 | asdAsgaaUfacuguccCfuUfuuaagscsc | 865 | UGCUUAAAAGGGACAGUAUUCUC | 379 |
| AD-1143278.1 | csusuaaaAfgGfGfAfcaguauucuuL96 | 377 | asdAsgadAudAcuguccCfuUfuuaagscsc | 866 | UGCUUAAAAGGGACAGUAUUCUC | 379 |
| AD-1143279.1 | usasaaAfgGfGfAfcaguauucuuL96 | 867 | asdAsgaaUfacuguccCfuUfuuasasg | 868 | CUUAAAAGGGACAGUAUUCUC | 828 |
| AD-1143280.1 | usasaaAfgGfGfAfcaguauucuuL96 | 867 | asdAsgadAudAcuguccCfuUfuuasasg | 869 | CUUAAAAGGGACAGUAUUCUC | 828 |
| AD-1143281.1 | csusuaaaagdGgdAcaguauucuuL96 | 870 | asdAsgaaUfacuguccCfuUfuuaagscsc | 865 | UGCUUAAAAGGGACAGUAUUCUC | 379 |
| AD-1143282.1 | csusuaaaagdGgdAcaguauucuuL96 | 870 | asdAsgadAudAcuguccCfuUfuuaagscsc | 866 | UGCUUAAAAGGGACAGUAUUCUC | 379 |
| AD-1143283.1 | csusuaaaagdGgdAcdAguauucuuL96 | 871 | asdAsgaaUfacuguccCfuUfuuaagscsc | 865 | UGCUUAAAAGGGACAGUAUUCUC | 379 |
| AD-1143284.1 | csusuaaaagdGgdAcdAguauucuuL96 | 871 | asdAsgadAudAcuguccCfuUfuuaagscsc | 866 | UGCUUAAAAGGGACAGUAUUCUC | 379 |
| AD-960064.3 | asasaaggGfaCfAfGfuauucucaguL96 | 350 | asCfsugaGfaAfUfacugUfcCfcuuuusasa | 351 | UUAAAAGGGACAGUAUUCUCAGU | 352 |
| AD-1143285.1 | asasaaggGfaCfAfGfuauucucaguL96 | 350 | asCfsugaGfaauacugUfcCfcuuuusasa | 872 | UUAAAAGGGACAGUAUUCUCAGU | 352 |
| AD-1143286.1 | asasaaggGfaCfAfGfuauucucaguL96 | 350 | asCfsugdAgdAauacugUfcCfcuuuusasa | 873 | UUAAAAGGGACAGUAUUCUCAGU | 352 |
| AD-1143287.1 | asasaaggGfaCfAfGfuauucucaguL96 | 350 | asCfsugdAgdAauacugUfcCfcuuuusgsc | 874 | UUAAAAGGGACAGUAUUCUCAGU | 352 |
| AD-1143288.1 | asasaaggGfaCfAfGfuauucucaguL96 | 350 | asCfsugdAgdAauacugUfcCfcuuuuscsc | 875 | UUAAAAGGGACAGUAUUCUCAGU | 352 |
| AD-1143289.1 | asasggGfaCfAfGfuauucucaguL96 | 876 | asCfsugdAgdAauacugUfcCfcuususu | 877 | AAAAGGGACAGUAUUCUCAGU | 878 |
| AD-1143290.1 | asasaagggaCfadGuauucucaguL96 | 879 | asCfsugdAgdAauacugUfcCfcuuuusgsc | 874 | UUAAAAGGGACAGUAUUCUCAGU | 352 |
| AD-1143291.1 | asasaagggaCfadGuauucucaguL96 | 879 | asCfsugdAgdAauacugUfcCfcuuuuscsc | 875 | UUAAAAGGGACAGUAUUCUCAGU | 352 |
| AD-1143292.1 | asasaagggaCfadGuauuuucaguL96 | 880 | asCfsugdAadAauacugUfcCfcuuuusgsc | 881 | UUAAAAGGGACAGUAUUCUCAGU | 352 |
| AD-1143293.1 | asasaagggadCadGuauucucaguL96 | 882 | asCfsugdAgdAauacugUfcCfcuuuusgsc | 874 | UUAAAAGGGACAGUAUUCUCAGU | 352 |
| AD-1143294.1 | asasaagggadCadGuauucucaguL96 | 882 | asCfsugdAgdAauacugUfcCfcuuuuscsc | 875 | UUAAAAGGGACAGUAUUCUCAGU | 352 |
| AD-1143295.1 | asasaagggadCadGUfauucucaguL96 | 883 | asCfsugdAgdAauacugUfcCfcuuuusgsc | 874 | UUAAAAGGGACAGUAUUCUCAGU | 352 |
| AD-1143296.1 | asasaagggadCadGUfauucucaguL96 | 883 | asCfsugdAgdAauacugUfcCfcuuuuscsc | 875 | UUAAAAGGGACAGUAUUCUCAGU | 352 |
| AD-960096.3 | cscsaauaAfaGfCfUfggacaagaauL96 | 347 | asUfsucuUfgUfCfcagcUfuUfauuggsgsa | 348 | UCCCAAUAAAGCUGGACAAGAAG | 349 |
| AD-1143297.1 | cscsaauaAfaGfCfUfggauaagaauL96 | 884 | asUfsucuUfauccagcUfuUfauuggsgsa | 885 | UCCCAAUAAAGCUGGACAAGAAG | 349 |
| AD-1143298.1 | cscsaauaAfaGfCfUfggacaagaauL96 | 347 | asUfsucdTu(G2p)uccagcUfuUfauuggsgsa | 886 | UCCCAAUAAAGCUGGACAAGAAG | 349 |
| AD-1143299.1 | cscsaauaAfaGfCfUfggacaagaauL96 | 347 | asUfsucdTu(G2p)uccagcUfuUfauuggsgsc | 887 | UCCCAAUAAAGCUGGACAAGAAG | 349 |
| AD-1143300.1 | asasuaAfaGfCfUfggacaagaauL96 | 888 | asUfsucdTu(G2p)uccagcUfuUfauusgsg | 889 | CCAAUAAAGCUGGACAAGAAG | 890 |
| AD-1143301.1 | asasuaAfaGfCfUfggacaagaauL96 | 888 | asUfsucdTu(G2p)uccagcUfuUfauuscsc | 891 | CCAAUAAAGCUGGACAAGAAG | 890 |
| AD-1143302.1 | cscsaauaaagCfUfggacaagaauL96 | 892 | asUfsucdTu(G2p)uccagcUfuUfauuggsgsc | 887 | UCCCAAUAAAGCUGGACAAGAAG | 349 |
| AD-1143303.1 | cscsaauaaagCfUfggacaagaauL96 | 892 | asUfsucdTu(G2p)uccagcUfuUfauusgsg | 889 | CCAAUAAAGCUGGACAAGAAG | 890 |
| AD-1143304.1 | cscsaauadAagCfUfggacaagaauL96 | 893 | asUfsucdTu(G2p)uccagcUfuUfauuggsgsc | 887 | UCCCAAUAAAGCUGGACAAGAAG | 349 |
| AD-1143305.1 | cscsaauadAagCfUfggacaagaauL96 | 893 | asUfsucdTu(G2p)uccagcUfuUfauusgsg | 889 | CCAAUAAAGCUGGACAAGAAG | 890 |
| AD-1143306.1 | cscsaauaaagCfUfggacaagaauL96 | 892 | asUfsucuUfguccagcUfuUfauuggsgsa | 894 | UCCCAAUAAAGCUGGACAAGAAG | 349 |
| AD-1143307.1 | cscsaauadAagCfUfggacaagaauL96 | 893 | asUfsucuUfguccagcUfuUfauuggsgsa | 894 | UCCCAAUAAAGCUGGACAAGAAG | 349 |
| AD-960481.3 | asasgcugGfaCfAfAfgaagcugcuuL96 | 454 | asAfsgcag(Cgn)uucuugUfcCfagcuususa | 718 | UAAAGCUGGACAAGAAGCUGCUA | 456 |
| AD-1143308.1 | asasgcugGfaCfAfAfgaagcugcuuL96 | 454 | asAfsgcdAg(Cgn)uucuugUfcCfagcuususa | 895 | UAAAGCUGGACAAGAAGCUGCUA | 456 |
| AD-1143309.1 | asasgcugGfaCfAfAfgaagcugcuuL96 | 454 | asdAsgcdAg(Cgn)uucuugUfcCfagcuususa | 896 | UAAAGCUGGACAAGAAGCUGCUA | 456 |
| AD-1143310.1 | asasgcugGfaCfAfAfgaagcugcuuL96 | 454 | asdAsgcdAg(C2p)uucuugUfcCfagcuususa | 897 | UAAAGCUGGACAAGAAGCUGCUA | 456 |
| AD-1143311.1 | asasgcugGfaCfAfAfgaagcugcuuL96 | 454 | asdAsgcdAg(Cgn)uucuugUfcCfagcuususc | 898 | UAAAGCUGGACAAGAAGCUGCUA | 456 |
| AD-1143312.1 | asasgcugGfaCfAfAfgaagcugcuuL96 | 454 | asdAsgcdAg(C2p)uucuugUfcCfagcuususc | 899 | UAAAGCUGGACAAGAAGCUGCUA | 456 |
| AD-1143313.1 | asasgcugGfaCfAfAfgaagcugcuuL96 | 454 | asdAsgcdAg(Cgn)uucuugUfcCfagcuuscsc | 900 | UAAAGCUGGACAAGAAGCUGCUA | 456 |
| AD-1143314.1 | asasgcugGfaCfAfAfgaagcugcuuL96 | 454 | asdAsgcdAg(C2p)uucuugUfcCfagcuuscsc | 901 | UAAAGCUGGACAAGAAGCUGCUA | 456 |
| AD-1143315.1 | gscsugGfaCfAfAfgaagcugcuuL96 | 902 | asdAsgcdAg(Cgn)uucuugUfcCfagcsusu | 903 | AAGCUGGACAAGAAGCUGCUA | 904 |
| AD-1143316.1 | gscsugGfaCfAfAfgaagcugcuuL96 | 902 | asdAsgcdAg(C2p)uucuugUfcCfagcsusu | 905 | AAGCUGGACAAGAAGCUGCUA | 904 |
| AD-1143317.1 | asasgcuggaCfadAgaagcugcuuL96 | 906 | asdAsgcdAg(Cgn)uucuugUfcCfagcuuscsc | 900 | UAAAGCUGGACAAGAAGCUGCUA | 456 |
| AD-1143318.1 | asasgcuggaCfadAgaagcugcuuL96 | 906 | asdAsgcdAg(C2p)uucuugUfcCfagcuuscsc | 901 | UAAAGCUGGACAAGAAGCUGCUA | 456 |
| AD-1143319.1 | asasgcuggaCfadAgdAagcugcuuL96 | 907 | asdAsgcdAg(Cgn)uucuugUfcCfagcuuscsc | 900 | UAAAGCUGGACAAGAAGCUGCUA | 456 |
| AD-1143320.1 | asasgcuggaCfadAgdAagcugcuuL96 | 907 | asdAsgcdAg(C2p)uucuugUfcCfagcuuscsc | 901 | UAAAGCUGGACAAGAAGCUGCUA | 456 |
| AD-1143321.1 | asasgcuggaCfadAgaagcuacuuL96 | 908 | asdAsgudAg(C2p)uucuugUfcCfagcuuscsc | 909 | UAAAGCUGGACAAGAAGCUGCUA | 456 |
| AD-1143322.1 | asasgcuggaCfadAgaaguugcuuL96 | 910 | asdAsgcdAa(C2p)uucuugUfcCfagcuuscsc | 911 | UAAAGCUGGACAAGAAGCUGCUA | 456 |
| AD-1183925 | asasgcuggaCfAfAfgaagcugcuuL96 | 912 | asdAsgcdAg(C2p)uucuugUfcCfagcuususc | 899 | UAAAGCUGGACAAGAAGCUGCUA | 456 |
| AD-1183926 | gscsuggaCfAfAfgaagcugcuuL96 | 913 | asdAsgcdAg(C2p)uucuugUfcCfagcsusu | 905 | AAGCUGGACAAGAAGCUGCUA | 904 |
| AD-1019001 | Y44sacgggacaGfUfAfuucucaguiasY44 | 914 | usCfsasCfuGfagaauAfcUfgUfcCfcGfsu | 915 | AAGGGACAGUAUUCUCAGUGC | 916 |

TABLE 16
Single Dose Free Uptake Screens in Hep3B cells

| | 500 nM | | 100 nM | | 10 nM | | 1 nM | |
|---|---|---|---|---|---|---|---|---|
| Duplex Name | Avg | SD | Avg | SD | Avg | SD | Avg | SD |
| AD-80794.10 | 50.01 | 2.91 | 57.23 | 3.03 | 73.67 | 4.07 | 92.13 | 2.45 |
| AD-1143240.1 | 59.83 | 5.91 | 62.99 | 4.12 | 75.71 | 3.36 | 90.44 | 4.01 |
| AD-1143241.1 | 46.00 | 2.20 | 51.40 | 2.74 | 70.00 | 5.07 | 87.46 | 2.15 |
| AD-1143242.1 | 46.98 | 2.67 | 57.58 | 4.13 | 74.48 | 4.89 | 85.07 | 2.08 |
| AD-1143243.1 | 32.17 | 2.39 | 37.22 | 2.97 | 62.41 | 5.86 | 83.22 | 3.83 |
| AD-1143244.1 | 61.26 | 3.79 | 65.51 | 3.33 | 70.95 | 4.64 | 86.55 | 1.88 |
| AD-1143245.1 | 29.99 | 2.62 | 38.17 | 2.32 | 57.74 | 5.64 | 81.92 | 3.13 |
| AD-1143246.1 | 104.48 | 22.29 | 76.68 | 3.36 | 84.88 | 3.76 | 91.31 | 6.20 |
| AD-1143247.1 | 49.96 | 1.22 | 57.75 | 3.51 | 76.50 | 6.15 | 86.40 | 1.72 |
| AD-1143248.1 | 76.38 | 2.07 | 81.24 | 4.83 | 90.92 | 6.41 | 91.34 | 2.56 |
| AD-1143249.1 | 47.94 | 1.92 | 53.80 | 3.52 | 74.14 | 2.76 | 89.48 | 3.45 |
| AD-960030.3 | 41.64 | 0.96 | 49.21 | 2.30 | 70.81 | 4.30 | 90.77 | 7.86 |
| AD-1143250.1 | 43.66 | 1.99 | 50.06 | 2.06 | 71.09 | 1.41 | 88.52 | 1.54 |
| AD-1143251.1 | 44.46 | 2.85 | 53.43 | 0.48 | 70.58 | 4.73 | 87.93 | 2.59 |
| AD-1143252.1 | 35.28 | 4.47 | 39.27 | 3.04 | 63.45 | 2.88 | 84.67 | 3.62 |
| AD-1143253.1 | 45.97 | 4.59 | 48.91 | 3.12 | 72.50 | 3.30 | 85.82 | 2.60 |
| AD-1143254.1 | 33.14 | 1.27 | 39.94 | 2.86 | 67.59 | 4.55 | 85.51 | 1.63 |
| AD-1143255.1 | 22.44 | 3.31 | 33.91 | 6.67 | 53.15 | 3.97 | 80.09 | 3.20 |
| AD-1143256.1 | 12.09 | 1.29 | 18.11 | 1.50 | 54.06 | 9.34 | 75.50 | 2.77 |
| AD-1143257.1 | 108.85 | 5.61 | 93.98 | 5.84 | 92.13 | 5.41 | 93.92 | 3.11 |
| AD-1143258.1 | 84.74 | 1.55 | 82.30 | 2.97 | 85.54 | 5.46 | 93.59 | 2.95 |
| AD-1143259.1 | 84.03 | 3.05 | 88.74 | 1.41 | 85.29 | 2.51 | 100.73 | 15.35 |
| AD-1143260.1 | 87.46 | 3.43 | 78.59 | 4.36 | 83.55 | 2.88 | 91.04 | 3.38 |
| AD-960031.3 | 29.38 | 3.85 | 41.40 | 6.94 | 62.15 | 5.10 | 83.65 | 3.72 |
| AD-1143261.1 | 96.26 | 12.69 | 97.98 | 11.29 | 88.10 | 5.65 | 94.22 | 4.29 |
| AD-1143262.1 | 76.29 | 3.64 | 75.61 | 2.89 | 90.82 | 7.38 | 95.42 | 4.11 |
| AD-1143263.1 | 48.38 | 9.73 | 61.04 | 5.42 | 81.86 | 3.97 | 92.05 | 5.07 |
| AD-1143264.1 | 66.67 | 3.82 | 76.51 | 1.92 | 84.98 | 1.39 | 91.16 | 1.37 |
| AD-1143265.1 | 68.17 | 13.37 | 77.06 | 12.29 | 81.83 | 3.04 | 92.15 | 6.59 |
| AD-1143266.1 | 74.35 | 11.32 | 68.43 | 4.30 | 82.16 | 4.30 | 96.14 | 13.04 |
| AD-1143267.1 | 44.99 | 5.20 | 64.81 | 10.27 | 78.18 | 9.28 | 89.68 | 4.66 |
| AD-1143268.1 | 75.66 | 8.75 | 91.75 | 14.39 | 89.63 | 5.81 | 100.77 | 5.48 |
| AD-1143269.1 | 70.81 | 3.28 | 84.12 | 5.28 | 95.03 | 5.00 | 97.24 | 7.30 |
| AD-1143270.1 | 71.74 | 4.79 | 78.83 | 3.42 | 92.89 | 4.17 | 95.82 | 5.96 |
| AD-1143271.1 | 71.77 | 5.30 | 76.02 | 3.43 | 91.08 | 9.11 | 95.56 | 3.23 |
| AD-1143272.1 | 69.18 | 1.04 | 77.97 | 1.16 | 91.30 | 7.61 | 90.72 | 2.88 |
| AD-1143273.1 | 46.11 | 5.48 | 58.47 | 5.63 | 79.00 | 5.34 | 86.46 | 2.44 |
| AD-1143274.1 | 57.35 | 7.81 | 59.49 | 3.88 | 82.43 | 4.08 | 94.65 | 5.38 |
| AD-960062.3 | 42.21 | 6.42 | 58.97 | 13.39 | 76.38 | 11.22 | 100.56 | 15.42 |
| AD-1143275.1 | 54.25 | 10.60 | 67.40 | 11.53 | 80.59 | 6.62 | 108.48 | 13.17 |
| AD-1143276.1 | 57.96 | 3.63 | 64.19 | 4.11 | 80.40 | 1.72 | 91.66 | 2.79 |
| AD-1143277.1 | 60.46 | 6.29 | 73.08 | 8.35 | 114.87 | n/a | 95.41 | 7.44 |
| AD-1143278.1 | 30.74 | 2.87 | 46.93 | 7.31 | 75.59 | 3.54 | 90.06 | 12.78 |
| AD-1143279.1 | 46.16 | 2.13 | 63.91 | 11.43 | 84.18 | 4.57 | 89.02 | 3.39 |
| AD-1143280.1 | 26.65 | 6.19 | 39.95 | 8.20 | 71.49 | 2.71 | 84.48 | 2.10 |
| AD-1143281.1 | 83.25 | 5.26 | 97.82 | 9.56 | 87.57 | 5.49 | 95.78 | 5.34 |
| AD-1143282.1 | 62.39 | 5.01 | 70.93 | 12.74 | 77.38 | 0.93 | 92.25 | 3.23 |
| AD-1143283.1 | 74.72 | 3.35 | 81.27 | 5.49 | 92.84 | 2.43 | 100.14 | 3.42 |
| AD-1143284.1 | 53.26 | 1.19 | 63.20 | 4.02 | 83.55 | 3.21 | 95.11 | 4.68 |
| AD-960064.3 | 35.24 | 4.68 | 45.96 | 3.22 | 73.26 | 3.33 | 88.25 | 3.26 |
| AD-1143285.1 | 26.79 | 2.81 | 34.47 | 4.00 | 77.33 | 6.80 | 86.04 | 9.70 |
| AD-1143286.1 | 19.35 | 3.41 | 29.77 | 4.83 | 67.58 | 14.28 | 88.54 | 12.85 |
| AD-1143287.1 | 36.62 | 2.41 | 40.55 | 10.58 | 64.21 | 2.67 | 88.54 | 12.76 |
| AD-1143288.1 | 45.07 | 9.60 | 50.93 | 11.36 | 74.56 | 9.65 | 87.44 | 7.30 |
| AD-1143289.1 | 18.55 | 4.13 | 26.32 | 5.27 | 59.92 | 6.61 | 85.97 | 12.38 |
| AD-1143290.1 | 66.75 | 2.91 | 75.76 | 4.76 | 89.92 | 10.03 | 103.24 | 6.45 |
| AD-1143291.1 | 61.61 | 1.41 | 74.92 | 7.37 | 96.58 | 6.23 | 92.67 | 4.65 |
| AD-1143292.1 | 103.71 | 13.87 | 96.00 | 6.82 | 102.08 | 18.11 | 89.10 | 2.78 |
| AD-1143293.1 | 64.75 | 7.70 | 70.52 | 5.16 | 82.76 | 2.30 | 88.53 | 6.30 |
| AD-1143294.1 | 66.74 | 10.80 | 69.22 | 11.38 | 80.55 | 4.13 | 100.67 | 14.77 |
| AD-1143295.1 | 62.66 | 9.65 | 62.74 | 10.64 | 89.92 | 20.11 | 99.75 | 17.24 |
| AD-1143296.1 | 68.47 | 8.32 | 74.41 | 5.35 | 89.72 | 15.96 | 102.45 | 15.29 |
| AD-960096.3 | 62.06 | 9.14 | 62.82 | 3.97 | 73.10 | 3.78 | 98.71 | 13.86 |
| AD-1143297.1 | 63.46 | 2.13 | 64.77 | 0.99 | 94.66 | 15.45 | 87.45 | 1.11 |
| AD-1143298.1 | 36.30 | 4.11 | 45.39 | 2.87 | 77.72 | 6.66 | 88.99 | 6.44 |
| AD-1143299.1 | 63.33 | 7.70 | 60.86 | 4.26 | 84.28 | 16.31 | 83.82 | 4.27 |
| AD-1143300.1 | 31.00 | 5.52 | 36.78 | 5.31 | 75.23 | 10.17 | 89.41 | 15.09 |
| AD-1143301.1 | 63.14 | 13.06 | 51.90 | 3.83 | 83.74 | 24.11 | 97.24 | 14.28 |
| AD-1143302.1 | 65.92 | 4.89 | 72.42 | 3.43 | 82.76 | 5.03 | 94.16 | 5.49 |
| AD-1143303.1 | 72.20 | 8.33 | 70.63 | 2.96 | 89.97 | 10.86 | 101.84 | 15.93 |
| AD-1143304.1 | 55.09 | 2.79 | 63.03 | 4.77 | 78.29 | 1.36 | 82.37 | 3.89 |
| AD-1143305.1 | 56.12 | 9.04 | 58.35 | 3.55 | 85.76 | 6.85 | 95.38 | 7.01 |
| AD-1143306.1 | 95.15 | 16.35 | 87.12 | 1.78 | 94.75 | 12.83 | 93.02 | 5.19 |
| AD-1143307.1 | 101.10 | 14.18 | 89.16 | 9.67 | 98.12 | 17.65 | 97.60 | 10.55 |
| AD-960481.3 | 76.27 | 13.63 | 63.55 | 6.29 | 94.32 | 27.33 | 96.57 | 14.20 |
| AD-1143308.1 | 53.08 | 3.84 | 60.34 | 1.74 | 73.24 | 2.55 | 89.76 | 1.87 |
| AD-1143309.1 | 65.24 | 6.58 | 68.94 | 9.69 | 87.87 | 12.46 | 89.04 | 4.03 |
| AD-1143310.1 | 60.98 | 1.83 | 65.14 | 2.41 | 80.93 | 11.19 | 86.62 | 7.35 |
| AD-1143311.1 | 61.07 | 0.91 | 61.76 | 3.10 | 91.14 | 13.28 | 87.45 | 1.73 |
| AD-1143312.1 | 61.85 | 14.18 | 53.82 | 1.28 | 85.58 | 8.53 | 83.02 | 5.64 |
| AD-1143313.1 | 79.09 | 10.91 | 68.96 | 8.44 | 114.58 | 9.72 | 84.57 | 5.14 |
| AD-1143314.1 | 65.98 | 14.04 | 54.39 | 4.13 | 97.29 | 9.49 | 85.95 | 15.06 |
| AD-1143315.1 | 69.73 | 9.31 | 56.52 | 4.43 | 89.23 | 19.66 | 87.97 | 11.47 |
| AD-1143316.1 | 37.58 | 9.74 | 45.48 | 4.36 | 67.15 | 13.63 | 86.39 | 8.46 |
| AD-1143317.1 | 75.31 | 5.07 | 77.89 | 3.77 | 79.47 | 3.23 | 89.32 | 2.95 |
| AD-1143318.1 | 88.04 | 2.18 | 85.20 | 2.80 | 84.34 | 4.84 | 92.15 | 3.21 |
| AD-1143319.1 | 78.11 | 1.03 | 78.66 | 1.90 | 85.48 | 3.98 | 87.83 | 4.39 |
| AD-1143320.1 | 72.96 | 4.16 | 76.75 | 5.12 | 83.72 | 3.86 | 86.10 | 1.86 |
| AD-1143321.1 | 88.56 | 4.22 | 87.05 | 4.63 | 92.98 | 16.13 | 86.86 | 2.20 |
| AD-1143322.1 | 96.56 | 8.01 | 87.69 | 5.49 | 94.48 | 14.95 | 90.38 | 1.88 |

TABLE 17
APOC3 Single Dose Screens in Hep3B cells

| | 50 nM | | 10 nM | | 1 nM | | 0.1 nM | |
|---|---|---|---|---|---|---|---|---|
| Duplex Name | Avg | SD | Avg | SD | Avg | SD | Avg | SD |
| AD-80794.10 | 5.7 | 1.1 | 9.95 | 0.48 | 32.69 | 7.14 | 64.32 | 3.18 |
| AD-1143240.1 | 7.1 | 1.2 | 15.92 | 1.88 | 38.52 | 6.25 | 69.61 | 5.09 |
| AD-1143241.1 | 5.7 | 0.4 | 10.24 | 0.34 | 25.95 | 2.96 | 57.20 | 3.42 |
| AD-1143242.1 | 6.4 | 0.9 | 13.22 | 1.13 | 34.61 | 3.94 | 61.90 | 6.43 |
| AD-1143243.1 | 3.6 | 1.2 | 4.93 | 1.44 | 11.97 | 2.19 | 41.16 | 3.87 |
| AD-1143244.1 | 6.1 | 0.6 | 14.76 | 2.30 | 35.03 | 5.30 | 63.06 | 1.15 |
| AD-1143245.1 | 3.2 | 1.0 | 4.79 | 0.38 | 13.05 | 3.50 | 35.33 | 4.64 |
| AD-1143246.1 | 23.5 | 2.7 | 48.43 | 3.38 | 51.77 | 11.43 | 62.50 | 8.17 |
| AD-1143247.1 | 8.2 | 1.5 | 15.58 | 1.25 | 33.36 | 3.62 | 67.35 | 1.28 |
| AD-1143248.1 | 30.0 | 7.8 | 42.16 | 4.87 | 71.78 | 8.67 | 90.87 | 8.70 |
| AD-1143249.1 | 6.7 | 1.3 | 10.12 | 1.10 | 30.61 | 2.16 | 73.82 | 12.68 |
| AD-960030.3 | 6.3 | 1.2 | 10.86 | 0.88 | 33.81 | 1.58 | 78.29 | 7.19 |
| AD-1143250.1 | 7.3 | 2.6 | 11.13 | 3.32 | 38.58 | 5.25 | 74.13 | 15.33 |
| AD-1143251.1 | 5.7 | 0.4 | 11.28 | 2.82 | 26.55 | 4.13 | 73.77 | 9.73 |
| AD-1143252.1 | 3.6 | 0.8 | 7.27 | 1.30 | 14.89 | 2.35 | 60.85 | 12.26 |
| AD-1143253.1 | 3.7 | 0.9 | 9.57 | 2.15 | 24.55 | 4.12 | 66.79 | 6.79 |
| AD-1143254.1 | 3.4 | 0.7 | 5.32 | 2.07 | 14.73 | 2.96 | 53.26 | 5.75 |
| AD-1143255.1 | 4.6 | 1.3 | 5.67 | 1.06 | 21.00 | 4.11 | 71.94 | 13.73 |
| AD-1143256.1 | 3.3 | 0.6 | 4.51 | 0.83 | 11.84 | 1.22 | 44.47 | 5.74 |
| AD-1143257.1 | 42.1 | 5.6 | 66.28 | 4.64 | 77.50 | 16.10 | 85.21 | 5.60 |
| AD-1143258.1 | 14.8 | 2.8 | 30.73 | 2.64 | 50.53 | 2.24 | 76.78 | 4.31 |
| AD-1143259.1 | 39.3 | 10.8 | 62.34 | 10.95 | 58.31 | 9.70 | 92.23 | 23.63 |
| AD-1143260.1 | 10.3 | 4.1 | 27.71 | 4.89 | 46.07 | 6.70 | 76.35 | 6.59 |
| AD-960031.3 | 4.1 | 0.5 | 6.33 | 1.49 | 13.71 | 3.98 | 52.14 | 2.03 |
| AD-1143261.1 | 30.0 | 7.0 | 45.40 | 7.52 | 76.11 | 11.73 | 96.35 | 13.51 |
| AD-1143262.1 | 8.7 | 0.6 | 12.67 | 2.42 | 33.93 | 4.28 | 80.72 | 10.76 |
| AD-1143263.1 | 7.0 | 1.9 | 8.59 | 1.53 | 24.97 | 4.76 | 70.04 | 3.98 |
| AD-1143264.1 | 10.5 | 2.6 | 15.57 | 2.68 | 36.20 | 4.20 | 69.58 | 4.36 |
| AD-1143265.1 | 7.0 | 1.1 | 14.90 | 4.74 | 29.19 | 7.67 | 68.07 | 6.60 |
| AD-1143266.1 | 7.4 | 3.6 | 14.06 | 3.79 | 36.54 | 10.79 | 69.23 | 16.16 |
| AD-1143267.1 | 6.4 | 2.8 | 10.39 | 4.74 | 27.85 | 9.35 | 77.07 | 14.58 |
| AD-1143268.1 | 18.4 | 5.3 | 30.21 | 7.20 | 64.69 | 15.99 | 87.24 | 6.39 |
| AD-1143269.1 | 12.7 | 1.0 | 23.02 | 5.11 | 48.27 | 3.18 | 89.49 | 12.32 |
| AD-1143270.1 | 11.9 | 1.8 | 23.75 | 6.38 | 48.58 | 8.61 | 85.30 | 6.72 |
| AD-1143271.1 | 15.6 | 2.4 | 22.50 | 4.14 | 51.50 | 15.12 | 75.61 | 4.59 |
| AD-1143272.1 | 13.6 | 0.7 | 23.31 | 5.30 | 48.00 | 6.30 | 79.88 | 3.87 |
| AD-1143273.1 | 6.5 | 1.7 | 10.62 | 2.32 | 30.43 | 12.95 | 59.42 | 3.85 |
| AD-1143274.1 | 5.9 | 1.9 | 9.74 | 2.72 | 20.44 | 5.25 | 59.55 | 8.94 |
| AD-960062.3 | 6.0 | 1.1 | 14.90 | 3.08 | 38.29 | 5.48 | 78.23 | 11.31 |
| AD-1143275.1 | 21.9 | 20.0 | 20.20 | 4.71 | 58.80 | 19.25 | 87.53 | 3.36 |
| AD-1143276.1 | 13.5 | 4.1 | 17.22 | 1.37 | 45.40 | 5.79 | 81.50 | 8.12 |
| AD-1143277.1 | 11.2 | 2.2 | 17.51 | 2.37 | 42.03 | 6.65 | 81.04 | 9.28 |
| AD-1143278.1 | 5.0 | 1.4 | 6.79 | 0.82 | 15.99 | 2.77 | 58.30 | 14.40 |
| AD-1143279.1 | 7.6 | 2.0 | 11.26 | 1.68 | 32.37 | 4.56 | 62.14 | 3.43 |
| AD-1143280.1 | 4.8 | 3.0 | 5.89 | 0.52 | 13.05 | 3.98 | 41.79 | 5.31 |
| AD-1143281.1 | 45.7 | 5.9 | 59.48 | 7.68 | 70.38 | 3.75 | 77.63 | 7.52 |
| AD-1143282.1 | 16.3 | 2.4 | 24.29 | 6.42 | 56.76 | 5.55 | 80.93 | 3.65 |
| AD-1143283.1 | 25.8 | 1.5 | 44.82 | 11.38 | 72.55 | 14.90 | 94.36 | 5.31 |
| AD-1143284.1 | 10.4 | 2.8 | 16.97 | 2.34 | 42.91 | 5.08 | 79.91 | 4.59 |
| AD-960064.3 | 4.2 | 0.6 | 7.37 | 3.78 | 19.17 | 4.36 | 49.10 | 5.66 |
| AD-1143285.1 | 5.4 | 1.4 | 7.86 | 1.22 | 17.89 | 1.37 | 54.59 | 14.15 |
| AD-1143286.1 | 4.0 | 1.4 | 5.02 | 1.00 | 14.71 | 4.90 | 39.71 | 1.47 |
| AD-1143287.1 | 4.7 | 1.9 | 5.59 | 2.40 | 15.79 | 4.39 | 48.62 | 13.52 |
| AD-1143288.1 | 6.7 | 1.6 | 6.50 | 0.81 | 21.80 | 8.36 | 64.64 | 18.78 |
| AD-1143289.1 | 4.8 | 0.7 | 7.27 | 1.89 | 19.96 | 2.45 | 72.86 | 11.19 |
| AD-1143290.1 | 13.1 | 3.0 | 21.10 | 3.85 | 56.96 | 2.68 | 84.38 | 17.46 |
| AD-1143291.1 | 11.3 | 0.7 | 20.46 | 3.83 | 57.48 | 7.36 | 83.09 | 13.09 |
| AD-1143292.1 | 73.7 | 6.0 | 76.74 | 12.40 | 85.93 | 13.10 | 85.38 | 4.81 |
| AD-1143293.1 | 9.3 | 1.3 | 20.27 | 4.53 | 42.95 | 5.74 | 73.75 | 2.06 |
| AD-1143294.1 | 12.1 | 1.4 | 25.36 | 7.70 | 49.62 | 7.18 | 86.00 | 5.63 |
| AD-1143295.1 | 8.3 | 2.3 | 12.41 | 2.06 | 36.35 | 1.40 | 58.61 | 9.02 |
| AD-1143296.1 | 9.8 | 1.2 | 18.77 | 6.23 | 47.68 | 14.59 | 85.91 | 4.26 |
| AD-960096.3 | 8.5 | 1.9 | 10.64 | 2.21 | 28.32 | 4.33 | 69.12 | 1.44 |
| AD-1143297.1 | 8.7 | 0.7 | 14.90 | 2.16 | 51.05 | 16.48 | 90.58 | 15.04 |
| AD-1143298.1 | 4.9 | 0.3 | 6.62 | 0.97 | 18.55 | 4.52 | 65.95 | 17.11 |
| AD-1143299.1 | 5.5 | 1.2 | 7.73 | 1.65 | 22.91 | 1.45 | 59.57 | 8.18 |
| AD-1143300.1 | 4.9 | 1.2 | 8.31 | 3.19 | 22.19 | 11.16 | 52.43 | 7.83 |
| AD-1143301.1 | 6.3 | 0.9 | 10.75 | 1.98 | 28.49 | 7.31 | 70.30 | 10.58 |
| AD-1143302.1 | 7.9 | 1.5 | 11.19 | 3.20 | 38.83 | 14.98 | 87.33 | 15.21 |
| AD-1143303.1 | 8.6 | 1.3 | 12.40 | 2.65 | 48.46 | 1.79 | 98.13 | 17.19 |
| AD-1143304.1 | 9.7 | 2.5 | 11.07 | 1.79 | 35.65 | 3.16 | 93.11 | 17.36 |
| AD-1143305.1 | 9.1 | 4.3 | 10.51 | 2.17 | 36.75 | 4.73 | 75.09 | 5.82 |
| AD-1143306.1 | 41.1 | 6.7 | 58.50 | 7.88 | 85.88 | 16.83 | 85.51 | 2.76 |
| AD-1143307.1 | 37.6 | 4.0 | 48.21 | 1.96 | 90.07 | 19.23 | 99.33 | 19.17 |
| AD-960481.3 | 14.3 | 3.0 | 16.70 | 1.93 | 24.93 | 4.18 | 58.59 | 12.39 |
| AD-1143308.1 | 10.4 | 0.9 | 11.43 | 0.75 | 20.45 | 6.28 | 55.52 | 9.39 |
| AD-1143309.1 | 15.5 | 1.4 | 16.40 | 2.68 | 34.69 | 2.64 | 67.90 | 12.70 |
| AD-1143310.1 | 13.8 | 1.0 | 15.28 | 1.15 | 30.24 | 5.65 | 68.82 | 8.91 |
| AD-1143311.1 | 15.4 | 2.4 | 17.79 | 2.39 | 34.59 | 7.22 | 65.86 | 10.52 |
| AD-1143312.1 | 14.5 | 1.6 | 15.72 | 3.57 | 31.73 | 11.40 | 57.08 | 6.92 |
| AD-1143313.1 | 20.8 | 3.4 | 27.95 | 14.33 | 42.27 | 7.42 | 75.75 | 8.10 |
| AD-1143314.1 | 17.1 | 2.1 | 19.52 | 2.15 | 37.72 | 8.99 | 72.95 | 22.77 |
| AD-1143315.1 | 12.7 | 3.7 | 17.40 | 3.53 | 31.01 | 8.81 | 76.52 | 15.22 |
| AD-1143316.1 | 11.8 | 0.8 | 14.83 | 1.86 | 30.60 | 5.14 | 67.90 | 8.60 |
| AD-1143317.1 | 18.8 | 2.0 | 22.92 | 3.28 | 44.93 | 5.70 | 70.55 | 6.43 |
| AD-1143318.1 | 35.6 | 2.2 | 34.82 | 2.89 | 59.98 | 8.35 | 75.30 | 3.45 |
| AD-1143319.1 | 15.9 | 1.3 | 21.27 | 3.79 | 41.72 | 6.38 | 70.74 | 12.44 |
| AD-1143320.1 | 23.8 | 1.4 | 33.05 | 5.65 | 59.79 | 7.71 | 68.64 | 11.31 |
| AD-1143321.1 | 52.4 | 6.7 | 60.14 | 7.06 | 73.20 | 5.57 | 71.89 | 1.25 |
| AD-1143322.1 | 51.0 | 3.8 | 62.29 | 7.70 | 67.07 | 7.38 | 78.84 | 15.84 |

[0787] Duplexes of interest, identified from the above in vitro SAR studies, were evaluated in vivo. In particular, at pre-dose day −14 wild-type mice (C57BL/6) were transduced by retroorbital administration of 2×10¹⁰ viral particles of an adeno-associated virus 8 (AAV8) vector encoding human APOC3. In particular, mice were administered an AAV8 encoding the human APOC3 mRNA, referred to as AAV8-TBG-PI-APOC3.

[0788] At day 0, groups of three mice were subcutaneously administered a single 3 mg/kg dose of the agents of interest or PBS control. Table 18 provides the treatment groups and Table 19 provides the duplexes of interest. At day 7 or day 14 post-dose animals were sacrificed, liver samples were collected and snap-frozen in liquid nitrogen. Liver mRNA was extracted and analyzed by the RT-QPCR method.

[0789] Human APOC3 mRNA levels were compared to a housekeeping gene, GAPDH. The values were then normalized to the average of PBS vehicle control group. The data were expressed as percent of baseline value, and presented as mean plus standard deviation. The results, listed in Table 20 and shown in FIG. 3, demonstrate that the exemplary duplex agents tested effectively reduce the level of the human APOC3 messenger RNA in vivo.

TABLE 18
Treatment Groups

| Group | Animal | | | |
|---|---|---|---|---|
| # | # | Treatment | Dose | Timepoint |
| 1 | 1 | PBS | n/a | D0, D7, |
| | 2 | | | D14 |
| | 3 | | | |
| 2 | 4 | Naïve | n/a | |
| | 5 | (AAV only) | | |
| | 6 | | | |
| 3 | 7 | AD-80794 | 3 mpk | |
| | 8 | (Benchmark) | | |
| | 9 | | | |
| 4 | 10 | AD-960030 | | |
| | 11 | | | |
| | 12 | | | |
| 5 | 13 | AD-1143243 | | |
| | 14 | | | |
| | 15 | | | |
| 6 | 16 | AD-1143245 | | |
| | 17 | | | |
| | 18 | | | |
| 7 | 19 | AD-1143247 | | |
| | 20 | | | |
| | 21 | | | |
| 8 | 22 | AD-1143249 | | |
| | 23 | | | |
| | 24 | | | |
| 9 | 25 | AD-1143256 | | |
| | 26 | | | |
| | 27 | | | |
| 10 | 28 | AD-1143289 | | |
| | 29 | | | |
| | 30 | | | |
| 11 | 31 | AD-1143278 | | |
| | 32 | | | |
| | 33 | | | |
| 12 | 34 | AD-1143287 | | |
| | 35 | | | |
| | 36 | | | |
| 13 | 37 | AD-1143295 | | |
| | 38 | | | |
| | 39 | | | |
| 14 | 40 | AD-1143299 | | |
| | 41 | | | |
| | 42 | | | |
| 15 | 43 | AD-1143302 | | |
| | 44 | | | |
| | 45 | | | |
| 16 | 46 | AD-1143305 | | |
| | 47 | | | |
| | 48 | | | |
| 17 | 49 | AD-1183925 | | |
| | 50 | | | |
| | 51 | | | |
| 18 | 52 | AD-1183926 | | |
| | 53 | | | |
| | 54 | | | |
| 19 | 55 | AD-1019001 | | |
| | 56 | (Arrowhead) | | |
| | 57 | | | |
| 20 | 58 | AD-58295 | | |
| | 59 | | | |
| | 60 | | | |

TABLE 19
Duplexes of Interest

| | Range in NM- |
|---|---|
| Duplex ID | 000040.3 |
| AD-960030 | 429-451 |
| AD-1143243 | 432-452 |
| AD-1143245 | 432-452 |
| AD-1143247 | 430-452 |
| AD-1143249 | 430-452 |
| AD-1143256 | 431-451 |
| AD-1143260 | 429-451 |
| AD-1143278 | 430-452 |
| AD-1143287 | 433-455 |
| AD-1143295 | 433-455 |
| AD-1143299 | 504-526 |
| AD-1143302 | 504-526 |
| AD-1143305 | 506-526 |
| AD-1183925 | 510-532 |
| AD-1183926 | 512-532 |
| AD-58295 | Negative |
| | Control |

TABLE 20

| | % Message | |
|---|---|---|
| Duplex | Remaining | SD |
| PBS | 102.64 | 27.23 |
| AD-80794.11 | 19.86 | 9.05 |
| AD-960030.4 | 16.99 | 4.69 |
| AD-1143243.2 | 25.98 | 5.12 |
| AD-1143245.2 | 39.13 | 14.55 |
| AD-1143247.2 | 41.77 | 56.07 |
| AD-1143249.2 | 31.91 | 32.10 |
| AD-1143256.2 | 15.43 | 7.40 |
| AD-1143289.2 | 8.27 | 1.73 |
| AD-1143278.2 | 54.31 | 12.95 |
| AD-1143287.2 | 4.00 | 4.94 |
| AD-1143295.2 | 24.85 | 18.86 |
| AD-1143299.2 | 23.37 | 5.80 |
| AD-1143302.2 | 57.80 | 27.34 |
| AD-1143305.2 | 38.33 | 23.55 |
| AD-1183925.2 | 31.91 | 5.66 |
| AD-1183926.2 | 22.87 | 6.44 |
| AD-1019001.2 | 99.93 | 32.38 |
| AD-58295.5 | 84.59 | 43.87 |

1-79. (canceled)

80. A pharmaceutical composition comprising a double stranded ribonucleic acid (dsRNA) agent for inhibiting expression of apolipoprotein C3 in a cell, or a salt thereof,
wherein the dsRNA agent comprises a sense strand and an antisense strand forming a double stranded region,
wherein the sense strand comprises the nucleotide sequence 5′-csusuaaaAfgGfGfAfcaguauucua-3′ of SEQ ID NO:15 and the antisense strand comprises the nucleotide sequence 5′-usdAsgadAudAcuguccCfuUfuuaagscsc-3′ of SEQ ID NO:16,
wherein a, g, c and u are 2′-O-methyl (2′-OMe) A, G, C, and U respectively; Af, Gf, Cf and Uf are 2′-fluoro A, G, C and U respectively; dA is a 2′-deoxyadenosine-3′-phosphate nucleotide; and s is a phosphorothioate linkage; and wherein the 3′-end of the sense strand is conjugated to a ligand as shown in the following schematic: [chemical structure]
wherein X is O,
in a sterile aqueous solution.

81. A pharmaceutical composition comprising a double stranded ribonucleic acid (dsRNA) agent for inhibiting expression of apolipoprotein C3 in a cell, or a salt thereof,
wherein the dsRNA agent comprises a sense strand and an antisense strand forming a double stranded region,
wherein the sense strand consists of the nucleotide sequence 5′-csusuaaaAfgGfGfAfcaguauucua-3′ of SEQ ID NO:15,
and the antisense strand consists of the nucleotide sequence 5′-usdAsgadAudAcuguccCfuUfuuaagscsc-3′ of SEQ ID NO:16,
wherein a, g, c and u are 2′-O-methyl (2′-OMe) A, G, C, and U respectively; Af, Gf, Cf and Uf are 2′-fluoro A, G, C and U respectively; dA is a 2′-deoxyadenosine-3′-phosphate nucleotide; and s is a phosphorothioate linkage; and wherein the 3′-end of the sense strand is conjugated to a ligand as shown in the following schematic: [chemical structure]
wherein X is O,
in a sterile aqueous solution.

82. (canceled)

83. The pharmaceutical composition of claim 80, wherein the composition is for subcutaneous use.

84. The pharmaceutical composition of claim 80, wherein the dsRNA agent, or a salt thereof, is in an unbuffered solution.

85. The pharmaceutical composition of claim 84, wherein the unbuffered solution is saline or water.

86. The pharmaceutical composition of claim 80, wherein the dsRNA agent, or a salt thereof, is in a buffer solution.

87. The pharmaceutical composition of claim 86, wherein the buffer solution comprises acetate, citrate, prolamine, carbonate, or phosphate or any combination thereof.

88. The pharmaceutical composition of claim 87, wherein the buffer solution is phosphate buffered saline (PBS).

89. A method of inhibiting expression of an apolipoprotein C3 (APOC3) gene in a cell, the method comprising contacting the cell with the pharmaceutical composition of claim 80, thereby inhibiting expression of the APOC3 gene in the cell.

90-93. (canceled)

94. The method of claim 89, wherein contacting the cell with the pharmaceutical composition inhibits the expression of apolipoprotein C3 by at least 50%, 60%, 70%, 80%, 90%, or 95%.

95. (canceled)

96. A method of treating a subject having a disorder that would benefit from reduction in apolipoprotein C3 expression and/or preventing at least one symptom in a subject prone to having a disorder that would benefit from reduction in apolipoprotein C3 expression, the method comprising administering to the subject a therapeutically effective amount of the pharmaceutical composition of claim 80, thereby treating the subject having the disorder that would benefit from reduction in apolipoprotein C3 expression and/or preventing at least one symptom in the subject prone to having a disorder that would benefit from reduction in apolipoprotein C3 expression.

97. (canceled)

98. The method of claim 96, wherein the disorder is an apolipoprotein C3-associated disorder.

99. The method of claim 98, wherein the apolipoprotein C3-associated disorder is selected from the group consisting of hypertriglyceridemia, non-alcoholic fatty liver disease, non-alcoholic steatohepatitis, polycystic ovary syndrome, kidney disease, obesity, type 2 diabetes mellitus (insulin resistance), hypertension, atherosclerosis and pancreatitis.

100. The method of claim 98, wherein the apolipoprotein C3-associated disorder is hypertriglyceridemia.

101. The method of claim 96, wherein the subject is a human subject.

102. The method of claim 96, wherein the administration of the pharmaceutical composition to the subject causes a decrease in hypertriglyceridemia and/or a decrease in APOC3 protein accumulation.

103. (canceled)

104. The method of claim 96, wherein the pharmaceutical composition is administered to the subject subcutaneously.

105. The method of claim 96, further comprising determining the level of apolipoprotein C3 in a sample(s) from the subject.

106. (canceled)

107. (canceled)

108. A kit comprising the pharmaceutical composition of claim 80.

109. A vial comprising the pharmaceutical composition of claim 80.

110. A syringe comprising the pharmaceutical composition of claim 80.

111. The method of claim 100, wherein the apolipoprotein C3-associated disorder is primary hypertriglyceridemia, or secondary hypertriglyceridemia.

112. The method of claim 111, wherein the primary hypertriglyceridemia is selected from the group consisting of familial chylomicronemia, primary mixed hyperlipidemia, familial hypertriglyceridemia, familial combined hyperlipoproteinemia, and familial dysbetalipoproteinemia.

113. The pharmaceutical composition of claim 81, wherein the composition is for subcutaneous use.

114. The pharmaceutical composition of claim 81, wherein the dsRNA agent, or a salt thereof, is in an unbuffered solution.

115. The pharmaceutical composition of claim 114, wherein the unbuffered solution is saline or water.

116. The pharmaceutical composition of claim 81, wherein the dsRNA agent, or a salt thereof, is in a buffer solution.

117. The pharmaceutical composition of claim 116, wherein the buffer solution comprises acetate, citrate, prolamine, carbonate, or phosphate or any combination thereof.

118. The pharmaceutical composition of claim 117, wherein the buffer solution is phosphate buffered saline (PBS).

119. A method of inhibiting expression of an apolipoprotein C3 (APOC3) gene in a cell, the method comprising contacting the cell with the pharmaceutical composition of claim 81, thereby inhibiting expression of the APOC3 gene in the cell.

120. The method of claim 119, wherein contacting the cell with the pharmaceutical composition inhibits the expression of apolipoprotein CH by at least 50%, 60%, 70%, 80%, 90%, or 95%.

121. A method of treating a subject having a disorder that would benefit from reduction in apolipoprotein C3 expression and/or preventing at least one symptom in a subject prone to having a disorder that would benefit from reduction in apolipoprotein C3 expression, the method comprising administering to the subject a therapeutically effective amount of the pharmaceutical composition of claim 81, thereby treating the subject having the disorder that would benefit from reduction in apolipoprotein C3 expression and/or preventing at least one symptom in the subject prone to having a disorder that would benefit from reduction in apolipoprotein C3 expression.

122. The method of claim 121, wherein the disorder is an apolipoprotein C3-associated disorder.

123. The method of claim 122, wherein the apolipoprotein C3-associated disorder is selected from the group consisting of hypertriglyceridemia, non-alcoholic fatty liver disease, non-alcoholic steatohepatitis, polycystic ovary syndrome, kidney disease, obesity, type 2 diabetes mellitus (insulin resistance), hypertension, atherosclerosis and pancreatitis.

124. The method of claim 122, wherein the apolipoprotein C3-associated disorder is hypertriglyceridemia.

125. The method of claim 121, wherein the subject is a human subject.

126. The method of claim 121, wherein the administration of the pharmaceutical composition to the subject causes a decrease in hypertriglyceridemia and/or a decrease in APOC3 protein accumulation.

127. The method of claim 121, wherein the pharmaceutical composition is administered to the subject subcutaneously.

128. The method of claim 121, further comprising determining the level of apolipoprotein C3 in a sample(s) from the subject.

129. The method of claim 124, wherein the apolipoprotein C3-associated disorder is primary hypertriglyceridemia, or secondary hypertriglyceridemia.

130. The method of claim 129, wherein the primary hypertriglyceridemia is selected from the group consisting of familial chylomicronemia, primary mixed hyperlipidemia, familial hypertriglyceridemia, familial combined hyperlipoproteinemia, and familial dysbetalipoproteinemia.

131. A kit comprising the pharmaceutical composition of claim 81.

132. A vial comprising the pharmaceutical composition of claim 81.

133. A syringe comprising the pharmaceutical composition of claim 81.

The application's sequence listing, which the Patent Office published only in electronic form, follows.

SEQUENCE LISTING (916 sequences)

SEQ ID NO: 1 - DNA, 535 bp, Homo sapiens
  source 1..535: mol_type = genomic DNA
ctgctcagttcatccctagaggcagctgctccaggaacagaggtgccatgcagccccgggtactccttgttgttgccctcctggcgctcctggcctctgcccgagcttcagaggccgaggatgcctcccttctcagcttcatgcagggttacatgaagcacgccaccaagaccgccaaggatgcactgagcagcgtgcaggagtcccaggtggcccagcaggccaggggctgggtgaccgatggcttcagttccctgaaagactactggagcaccgttaaggacaagttctctgagttctgggatttggaccctgaggtcagaccaacttcagccgtggctgcctgagacctcaataccccaagtccacctgcctatccatcctgcgagctccttgggtcctgcaatctccagggctgcccctgtaggttgcttaaaagggacagtattctcagtgctctcctaccccacctcatgcctggcccccctccaggcatgctggcctcccaataaagctggacaagaagctgctatga

SEQ ID NO: 2 - DNA, 535 bp, Homo sapiens
  source 1..535: mol_type = genomic DNA
tcatagcagcttcttgtccagctttattgggaggccagcatgcctggaggggggccaggcatgaggtggggtaggagagcactgagaatactgtcccttttaagcaacctacaggggcagccctggagattgcaggacccaaggagctcgcaggatggataggcaggtggacttggggtattgaggtctcaggcagccacggctgaagttggtctgacctcagggtccaaatcccagaactcagagaacttgtccttaacggtgctccagtagtctttcagggaactgaagccatcggtcacccagcccctggcctgctgggccacctgggactcctgcacgctgctcagtgcatccttggcggtcttggtggcgtgcttcatgtaaccctgcatgaagctgagaagggaggcatcctcggcctctgaagctcgggcagaggccaggagcgccaggagggcaacaacaaggagtacccggggctgcatggcacctctgttcctggagcagctgcctctagggatgaactgagcag

SEQ ID NO: 3 - DNA, 567 bp, Macaca fascicularis
  source 1..567: mol_type = genomic DNA
aatataaaacaggtcagaaccctcctgcctgcctgctctgttcatccctagaggcagctgctccaggaacagaggcgccatgcagccccgggtactccttgttgctgccctgctgtcactcctggcctctgccagagcttcagaggccgaggacacctcccttcttggcttcatgcagggctacatgcagcatgccaccaagaccgccaaggatgcactgaccagcgtccaggagtcccaggtggcccagcaggccagaggctgggtgaccgatggcttcagttccctgaaagactactggagcaccgttaaggacaagttatctgggttctgggatttgaaccctgaggccaaacccactctggctgaggctgcctgagacctcaataccccaagtccacctgcctgtccatcctgccagctccttgggtcctgcagcctccagggctgcccctgtaggttgcttaaaagggacagtattctcagtgccctcctaccgcacctcatgcctggcccccctccaggcagggtgtcctcccaataaagctggacaagaagctgctatga

SEQ ID NO: 4 - DNA, 567 bp, Macaca fascicularis
  source 1..567: mol_type = genomic DNA
tcatagcagcttcttgtccagctttattgggaggacaccctgcctggaggggggccaggcatgaggtgcggtaggagggcactgagaatactgtcccttttaagcaacctacaggggcagccctggaggctgcaggacccaaggagctggcaggatggacaggcaggtggacttggggtattgaggtctcaggcagcctcagccagagtgggtttggcctcagggttcaaatcccagaacccagataacttgtccttaacggtgctccagtagtctttcagggaactgaagccatcggtcacccagcctctggcctgctgggccacctgggactcctggacgctggtcagtgcatccttggcggtcttggtggcatgctgcatgtagccctgcatgaagccaagaagggaggtgtcctcggcctctgaagctctggcagaggccaggagtgacagcagggcagcaacaaggagtacccggggctgcatggcgcctctgttcctggagcagctgcctctagggatgaacagagcaggcaggcaggagggttctgacctgttttatatt

SEQ ID NO: 5 - DNA, 547 bp, Macaca mulatta
  source 1..547: mol_type = genomic DNA
cctcctgcctgcctgctctgttcatccctagaggcagctgctccaggaacagaggcgccatgcagccccgggtactccttgttgctgccgtgctgtcactcctggcctctgccagagcttcagaggccgaggacacctcccttcttggcttcatgcaggactacatgcagcatgccaccaagaccgccaaggatgcactgaccagcgtccaggagtcccaggtggcccagcaggccagaggctgggtgaccgatggcttcagttccctgaaagactactggagcaccgttaaggacaagttatctgggttctgggatttgaaccctgaggccaaacccactctggctgaggctgcctgagacctcaataccccaagtccacctgcctgtccatcctgccagctccttgggtcctgcagcctccagggctgcccctgtaggttgcttaaaagggacagtattctcagtgccctcctaccgcacctcatgcctggcccccctccaggcagggtgtcctcccaataaagctggacaagaagctgctatga

SEQ ID NO: 6 - DNA, 547 bp, Macaca mulatta
  source 1..547: mol_type = genomic DNA
tcatagcagcttcttgtccagctttattgggaggacaccctgcctggaggggggccaggcatgaggtgcggtaggagggcactgagaatactgtcccttttaagcaacctacaggggcagccctggaggctgcaggacccaaggagctggcaggatggacaggcaggtggacttggggtattgaggtctcaggcagcctcagccagagtgggtttggcctcagggttcaaatcccagaacccagataacttgtccttaacggtgctccagtagtctttcagggaactgaagccatcggtcacccagcctctggcctgctgggccacctgggactcctggacgctggtcagtgcatccttggcggtcttggtggcatgctgcatgtagtcctgcatgaagccaagaagggaggtgtcctcggcctctgaagctctggcagaggccaggagtgacagcacggcagcaacaaggagtacccggggctgcatggcgcctctgttcctggagcagctgcctctagggatgaacagagcaggcaggcaggagg

SEQ ID NO: 7 - DNA, 527 bp, Mus musculus
  source 1..527: mol_type = genomic DNA
gcctgctcagttttatccctagaagcagctagctactccaggtacgtaggtgccatgcagccccggacgctcctcactgtggccctcttggctctcctggcatctgcccgagctgaagaggtagagggatccttgctgctgggctctgtacagggctacatggaacaagcctccaagacggtccaggatgcgctaagtagcgtgcaggagtccgatatagctgtggtggccaggggctggatggacaatcacttcagatccctgaaaggctactggagcaagtttactgacaagttcaccggcttctgggattctaaccctgaggaccaaccaactccagctattgagtcgtgagacttctgtgttgcagatgtgcctgttcctccatcctgctgcccccctccaggcctgccaggtggcccctgaaggttgctttaaggggaaagtatgttctcatgtcttcacccctccctagatctcacctaaacatgctgtccctaataaagctggataagaagctgctgtta

SEQ ID NO: 8 - DNA, 527 bp, Mus musculus
  source 1..527: mol_type = genomic DNA
taacagcagcttcttatccagctttattagggacagcatgtttaggtgagatctagggaggggtgaagacatgagaacatactttccccttaaagcaaccttcaggggccacctggcaggcctggaggggggcagcaggatggaggaacaggcacatctgcaacacagaagtctcacgactcaatagctggagttggttggtcctcagggttagaatcccagaagccggtgaacttgtcagtaaacttgctccagtagcctttcagggatctgaagtgattgtccatccagcccctggccaccacagctatatcggactcctgcacgctacttagcgcatcctggaccgtcttggaggcttgttccatgtagccctgtacagagcccagcagcaaggatccctctacctcttcagctcgggcagatgccaggagagccaagagggccacagtgaggagcgtccggggctgcatggcacctacgtacctggagtagctagctgcttctagggataaaactgagcaggc

SEQ ID NO: 9 - DNA, 536 bp, Rattus norvegicus
  source 1..536: mol_type = genomic DNA
aatataaaacagatcagaggcctcccggcttgcctgcccagttttatccctagaagcagctagctactccaggtgcacaggtgccatgcagccccgaatgctcctcatcgtggccctcgtggctctcctggcctctgcccgagctgatgagggagagggatccttgctgctgggctctatgcagggctacatggaacaagcctccaagacggtccaggatgcactaagcagcatgcaggagtctgatatagctgtggtggccaggggctggatggacaatcgcttcaaatccctgaaaggctactggagcaagttcactgataagttcactggcctctgggagtctggccctgaggaccaactaacaacaccaactcttgagccgtgagacctccatgttccagatgtgtctggccatctatcctgctgcctccgaaggttgctctaaggggaaagtatattctcatgcctttatccctccccagacctcacctaaacatgctgtccctaataaagctggacacgaagctgccatg

SEQ ID NO: 10 - DNA, 536 bp, Rattus norvegicus
  source 1..536: mol_type = genomic DNA
catggcagcttcgtgtccagctttattagggacagcatgtttaggtgaggtctggggagggataaaggcatgagaatatactttccccttagagcaaccttcggaggcagcaggatagatggccagacacatctggaacatggaggtctcacggctcaagagttggtgttgttagttggtcctcagggccagactcccagaggccagtgaacttatcagtgaacttgctccagtagcctttcagggatttgaagcgattgtccatccagcccctggccaccacagctatatcagactcctgcatgctgcttagtgcatcctggaccgtcttggaggcttgttccatgtagccctgcatagagcccagcagcaaggatccctctccctcatcagctcgggcagaggccaggagagccacgagggccacgatgaggagcattcggggctgcatggcacctgtgcacctggagtagctagctgcttctagggataaaactgggcaggcaagccgggaggcctctgatctgttttatatt

SEQ ID NO: 11 - DNA, 615 bp, Oryctolagus cuniculus
  source 1..615: mol_type = genomic DNA
cccgctgtcctggggcagtataaaaacaggccggcagcctcttgctgggcttctactcagttcatccccagaagcagtggctccaggaacagaggtgccgccatgcgtccctggctgctcctggttgtcaccctcctggcgctcctggcctctgcccgagcaatggaggccgaggaccccaaggacgcctcccttctcagcgtcatgcagggctatgtgcaacacgccaccaagacggcccatgacgcgctgagcagcatgcaggagtcccaaatggcccagcaggccaggggctgggtggacgctggcatcagctccctgaaaggctacttgagcacgtttgcggacaagttctctgggttctgggacctgagccctgaggccagtccgacccaggcgtctgaggctgtctgagacctcagcacccgcagtctgcctgcccatccgtcccgccgttgccctggctcccgtgggctccagagctgtccccacgcgtggcttgaagggacagtaacctcagtgccccctcgccccccccccccgacctggctcacttccaagcatactgcctcccaataaagctggacgagaagccgcggagagcgggatgtccca

SEQ ID NO: 12 - DNA, 615 bp, Oryctolagus cuniculus
  source 1..615: mol_type = genomic DNA
tgggacatcccgctctccgcggcttctcgtccagctttattgggaggcagtatgcttggaagtgagccaggtcggggggggggggcgagggggcactgaggttactgtcccttcaagccacgcgtggggacagctctggagcccacgggagccagggcaacggcgggacggatgggcaggcagactgcgggtgctgaggtctcagacagcctcagacgcctgggtcggactggcctcagggctcaggtcccagaacccagagaacttgtccgcaaacgtgctcaagtagcctttcagggagctgatgccagcgtccacccagcccctggcctgctgggccatttgggactcctgcatgctgctcagcgcgtcatgggccgtcttggtggcgtgttgcacatagccctgcatgacgctgagaagggaggcgtccttggggtcctcggcctccattgctcgggcagaggccaggagcgccaggagggtgacaaccaggagcagccagggacgcatggcggcacctctgttcctggagccactgcttctggggatgaactgagtagaagcccagcaagaggctgccggcctgtttttatactgccccaggacagcggg

SEQ ID NO: 13 - RNA, 21 nt, synthetic construct
  source 1..21: mol_type = other RNA
cttaaaagggacagtattcta

SEQ ID NO: 14 - RNA, 23 nt, synthetic construct
  source 1..23: mol_type = other RNA
tagaatactgtcccttttaagcc

SEQ ID NO: 15 - RNA, 21 nt, synthetic construct
  source 1..21: mol_type = other RNA
  modified_base 1: mod_base = OTHER; note = 2'-O-methylcytidine-3'-phosphorothioate
  modified_base 2: mod_base = OTHER; note = 2'-O-methyluridine-3'-phosphorothioate
  modified_base 3: mod_base = OTHER; note = 2'-O-methyluridine-3'-phosphate
  modified_base 4: mod_base = OTHER; note = 2'-O-methyladenosine-3'-phosphate
  modified_base 5: mod_base = OTHER; note = 2'-O-methyladenosine-3'-phosphate
  modified_base 6: mod_base = OTHER; note = 2'-O-methyladenosine-3'-phosphate
  modified_base 7: mod_base = OTHER; note = 2'-deoxy-2'-fluoroadenosine-3'-phosphate
  modified_base 8: mod_base = OTHER; note = 2'-O-methylguanosine-3'-phosphate
  modified_base 9: mod_base = OTHER; note = 2'-deoxy-2'-fluoroguanosine-3'-phosphate
  modified_base 10: mod_base = OTHER; note = 2'-deoxy-2'-fluoroguanosine-3'-phosphate
  modified_base 11: mod_base = OTHER; note = 2'-deoxy-2'-fluoroadenosine-3'-phosphate
  modified_base 12: mod_base = OTHER; note = 2'-O-methylcytidine-3'-phosphate
  modified_base 13: mod_base = OTHER; note = 2'-O-methyladenosine-3'-phosphate
  modified_base 14: mod_base = OTHER; note = 2'-O-methylguanosine-3'-phosphate
  modified_base 15: mod_base = OTHER; note = 2'-O-methyluridine-3'-phosphate
  modified_base 16: mod_base = OTHER; note = 2'-O-methyladenosine-3'-phosphate
  modified_base 17: mod_base = OTHER; note = 2'-O-methyluridine-3'-phosphate
  modified_base 18: mod_base = OTHER; note = 2'-O-methyluridine-3'-phosphate
  modified_base 19: mod_base = OTHER; note = 2'-O-methylcytidine-3'-phosphate
  modified_base 20: mod_base = OTHER; note = 2'-O-methyluridine-3'-phosphate
  modified_base 21: mod_base = OTHER; note = 2'-O-methyladenosine
cttaaaagggacagtattcta

SEQ ID NO: 16 - DNA, 23 bp, synthetic construct
  source 1..23: mol_type = other DNA
  modified_base 1: mod_base = OTHER; note = 2'-O-methyluridine-3'-phosphorothioate
  modified_base 2: mod_base = OTHER; note = 2'-deoxyadenosine-3'-phosphorothioate
  modified_base 3: mod_base = OTHER; note = 2'-O-methylguanosine-3'-phosphate
  modified_base 4: mod_base = OTHER; note = 2'-O-methyladenosine-3'-phosphate
  modified_base 6: mod_base = OTHER; note = 2'-O-methyluridine-3'-phosphate
  modified_base 8: mod_base = OTHER; note = 2'-O-methylcytidine-3'-phosphate
  modified_base 9: mod_base = OTHER; note = 2'-O-methyluridine-3'-phosphate
  modified_base 10: mod_base = OTHER; note = 2'-O-methylguanosine-3'-phosphate
  modified_base 11: mod_base = OTHER; note = 2'-O-methyluridine-3'-phosphate
  modified_base 12: mod_base = OTHER; note = 2'-O-methylcytidine-3'-phosphate
  modified_base 13: mod_base = OTHER; note = 2'-O-methylcytidine-3'-phosphate
  modified_base 14: mod_base = OTHER; note = 2'-deoxy-2'-fluorocytidine-3'-phosphate
  modified_base 15: mod_base = OTHER; note = 2'-O-methyluridine-3'-phosphate
  modified_base 16: mod_base = OTHER; note = 2'-deoxy-2'-fluorouridine-3'-phosphate
  modified_base 17: mod_base = OTHER; note = 2'-O-methyluridine-3'-phosphate
  modified_base 18: mod_base = OTHER; note = 2'-O-methyluridine-3'-phosphate
  modified_base 19: mod_base = OTHER; note = 2'-O-methyladenosine-3'-phosphate
  modified_base 20: mod_base = OTHER; note = 2'-O-methyladenosine-3'-phosphate
  modified_base 21: mod_base = OTHER; note = 2'-O-methylguanosine-3'-phosphorothioate
  modified_base 22: mod_base = OTHER; note = 2'-O-methylcytidine-3'-phosphorothioate
  modified_base 23: mod_base = OTHER; note = 2'-O-methylcytidine
  misc_feature 1: note = RNA
  misc_feature 3..4: note = RNA
  misc_feature 6: note = RNA
  misc_feature 8..23: note = RNA
  misc_feature 2: note = DNA
  misc_feature 5: note = DNA
  misc_feature 7: note = DNA
tagaatactgtcccttttaagcc

SEQ ID NO: 17 - RNA, 21 nt, synthetic construct
  source 1..21: mol_type = other RNA
  modified_base 1: mod_base = OTHER; note = 2'-O-methylcytidine-3'-phosphorothioate
  modified_base 2: mod_base = OTHER; note = 2'-O-methyluridine-3'-phosphorothioate
  modified_base 3: mod_base = OTHER; note = 2'-O-methyluridine-3'-phosphate
  modified_base 4: mod_base = OTHER; note = 2'-O-methyladenosine-3'-phosphate
  modified_base 5: mod_base = OTHER; note = 2'-O-methyladenosine-3'-phosphate
  modified_base 6: mod_base = OTHER; note = 2'-O-methyladenosine-3'-phosphate
  modified_base 7: mod_base = OTHER; note = 2'-deoxy-2'-fluoroadenosine-3'-phosphate
  modified_base 8: mod_base = OTHER; note = 2'-O-methylguanosine-3'-phosphate
  modified_base 9: mod_base = OTHER; note = 2'-deoxy-2'-fluoroguanosine-3'-phosphate
  modified_base 10: mod_base = OTHER; note = 2'-deoxy-2'-fluoroguanosine-3'-phosphate
  modified_base 11: mod_base = OTHER; note = 2'-deoxy-2'-fluoroadenosine-3'-phosphate
  modified_base 12: mod_base = OTHER; note = 2'-O-methylcytidine-3'-phosphate
  modified_base 13: mod_base = OTHER; note = 2'-O-methyladenosine-3'-phosphate
  modified_base 14: mod_base = OTHER; note = 2'-O-methylguanosine-3'-phosphate
  modified_base 15: mod_base = OTHER; note = 2'-O-methyluridine-3'-phosphate
  modified_base 16: mod_base = OTHER; note = 2'-O-methyladenosine-3'-phosphate
  modified_base 17: mod_base = OTHER; note = 2'-O-methyluridine-3'-phosphate
  modified_base 18: mod_base = OTHER; note = 2'-O-methyluridine-3'-phosphate
  modified_base 19: mod_base = OTHER; note = 2'-O-methylcytidine-3'-phosphate
  modified_base 20: mod_base = OTHER; note = 2'-O-methyluridine-3'-phosphate
  modified_base 21: mod_base = OTHER; note = 2'-O-methyladenosine-3'-phosphate ((2S,4R)-1-[29-[[2-(acetylamino)-2-deoxy-beta-D-galactopyra nosyl]oxy]-14,14-bis[[3-[[3-[[5-[[2-(acetylamino)-2-deoxy-b eta-D-galactopyranosyl]oxy]-1-oxopentyl]amino]propyl]amino] -3-oxopropoxy]methyl]-1,12,19,25-tetraoxo-16-oxa-13,20,24-t riazanonacos-1-yl]-4-hydroxy-2-pyrrolidinyl)methyl ester
cttaaaagggacagtattcta

SEQ ID NO: 18 - protein, 16 aa, unidentified
  REGION 1..16: note = source = /note="Description of Unknown: RFGF peptide"
AAVALLPAVLLALLAP

SEQ ID NO: 19 - protein, 11 aa, unidentified
  REGION 1..11: note = source = /note="Description of Unknown: RFGF analogue peptide"
AALLPVLLAAP

SEQ ID NO: 20 - protein, 13 aa, Human immunodeficiency virus
GRKKRRQRRRPPQ

SEQ ID NO: 21 - protein, 16 aa, Drosophila sp.
RQIKIWFQNRRMKWKK

SEQ ID NO: 22 - DNA, 21 bp, synthetic construct
  source 1..21: mol_type = other DNA
  modified_base 1: mod_base = OTHER; note = 2'-O-methylcytidine-3'-phosphate
  modified_base 2: mod_base = OTHER; note = 2'-O-methyluridine-3'-phosphate
  modified_base 3: mod_base = OTHER; note = 2'-O-methyluridine-3'-phosphate
  modified_base 4: mod_base = OTHER; note = adenosine-3'-phosphate
  modified_base 5: mod_base = OTHER; note = 2'-O-methylcytidine-3'-phosphate
  modified_base 6: mod_base = OTHER; note = guanosine-3'-phosphate
  modified_base 7: mod_base = OTHER; note = 2'-O-methylcytidine-3'-phosphate
  modified_base 8: mod_base = OTHER; note = 2'-O-methyluridine-3'-phosphate
  modified_base 9: mod_base = OTHER; note = guanosine-3'-phosphate
  modified_base 10: mod_base = OTHER; note = adenosine-3'-phosphate
  modified_base 11: mod_base = OTHER; note = guanosine-3'-phosphate
  modified_base 12: mod_base = OTHER; note = 2'-O-methyluridine-3'-phosphate
  modified_base 13: mod_base = OTHER; note = adenosine-3'-phosphate
  modified_base 14: mod_base = OTHER; note = 2'-O-methylcytidine-3'-phosphate
  modified_base 15: mod_base = OTHER; note = 2'-O-methyluridine-3'-phosphate
  modified_base 16: mod_base = OTHER; note = 2'-O-methyluridine-3'-phosphate
  modified_base 17: mod_base = OTHER; note = 2'-O-methylcytidine-3'-phosphate
  modified_base 18: mod_base = OTHER; note = guanosine-3'-phosphate
  modified_base 19: mod_base = OTHER; note = adenosine-3'-phosphate
  modified_base 20: mod_base = OTHER; note = 2'-deoxythymidine-3'-phosphorothioate
  misc_feature 1..19: note = RNA
  misc_feature 20..21: note = DNA
cttacgctgagtacttcgatt

SEQ ID NO: 23 - DNA, 21 bp, synthetic construct
  source 1..21: mol_type = other DNA
  modified_base 1: mod_base = OTHER; note = uridine-3'-phosphate
  modified_base 2: mod_base = OTHER; note = cytidine-3'-phosphate
  modified_base 3: mod_base = OTHER; note = guanosine-3'-phosphate
  modified_base 4: mod_base = OTHER; note = adenosine-3'-phosphate
  modified_base 5: mod_base = OTHER; note = adenosine-3'-phosphate
  modified_base 6: mod_base = OTHER; note = guanosine-3'-phosphate
  modified_base 7: mod_base = OTHER; note = 2'-O-methyluridine-3'-phosphate
  modified_base 8: mod_base = OTHER; note = adenosine-3'-phosphate
  modified_base 9: mod_base = OTHER; note = cytidine-3'-phosphate
  modified_base 10: mod_base = OTHER; note = uridine-3'-phosphate
  modified_base 11: mod_base = OTHER; note = 2'-O-methylcytidine-3'-phosphate
  modified_base 12: mod_base = OTHER; note = adenosine-3'-phosphate
  modified_base 13: mod_base = OTHER; note = guanosine-3'-phosphate
  modified_base 14: mod_base = OTHER; note = cytidine-3'-phosphate
  modified_base 15: mod_base = OTHER; note = guanosine-3'-phosphate
  modified_base 16: mod_base = OTHER; note = 2'-O-methyluridine-3'-phosphate
  modified_base 17: mod_base = OTHER; note = adenosine-3'-phosphate
  modified_base 18: mod_base = OTHER; note = adenosine-3'-phosphate
  modified_base 19: mod_base = OTHER; note = guanosine-3'-phosphate
  modified_base 20: mod_base = OTHER; note = 2'-deoxythymidine-3'-phosphorothioate
  misc_feature 1..19: note = RNA
  misc_feature 20..21: note = DNA
tcgaagtactcagcgtaagtt

SEQ ID NO: 24 - RNA, 21 nt, synthetic construct
  source 1..21: mol_type = other RNA
cttcagttccctgaaagactt

SEQ ID NO: 25 - RNA, 23 nt, synthetic construct
  source 1..23: mol_type = other RNA
aagtctttcagggaactgaagcc

SEQ ID NO: 26 - RNA, 21 nt, synthetic construct
  source 1..21: mol_type = other RNA
ttcagttccctgaaagactat

SEQ ID NO: 27 - RNA, 23 nt, synthetic construct
  source 1..23: mol_type = other RNA
atagtctttcagggaactgaagc

SEQ ID NO: 28 - RNA, 21 nt, synthetic construct
  source 1..21: mol_type = other RNA
ccaataaagctggacaagaat

SEQ ID NO: 29 - RNA, 23 nt, synthetic construct
  source 1..23: mol_type = other RNA
attcttgtccagctttattggga

SEQ ID NO: 30 - RNA, 21 nt, synthetic construct
  source 1..21: mol_type = other RNA
aaaagggacagtattctcagt

SEQ ID NO: 31 - RNA, 23 nt, synthetic construct
  source 1..23: mol_type = other RNA
actgagaatactgtcccttttaa

SEQ ID NO: 32 - RNA, 21 nt, synthetic construct
  source 1..21: mol_type = other RNA
atggcttcagttccctgaaat

SEQ ID NO: 33 - RNA, 23 nt, synthetic construct
  source 1..23: mol_type = other RNA
atttcagggaactgaagccatcg

SEQ ID NO: 34 - RNA, 21 nt, synthetic construct
  source 1..21: mol_type = other RNA
agcaccgttaaggacaagttt

SEQ ID NO: 35 - RNA, 23 nt, synthetic construct
  source 1..23: mol_type = other RNA
aaacttgtccttaacggtgctcc

SEQ ID NO: 36 - RNA, 21 nt, synthetic construct
  source 1..21: mol_type = other RNA
taaaagggacagtattctcat

SEQ ID NO: 37 - RNA, 23 nt, synthetic construct
  source 1..23: mol_type = other RNA
atgagaatactgtcccttttaag

SEQ ID NO: 38 - RNA, 21 nt, synthetic construct
  source 1..21: mol_type = other RNA
accgatggcttcagttccctt

SEQ ID NO: 39 - RNA, 23 nt, synthetic construct
  source 1..23: mol_type = other RNA
aagggaactgaagccatcggtca

SEQ ID NO: 40 - RNA, 21 nt, synthetic construct
  source 1..21: mol_type = other RNA
ttaaaagggacagtattctct

SEQ ID NO: 41 - RNA, 23 nt, synthetic construct
  source 1..23: mol_type = other RNA
agagaatactgtcccttttaagc

SEQ ID NO: 42 - RNA, 21 nt, synthetic construct
  source 1..21: mol_type = other RNA
gcttcagttccctgaaagact

SEQ ID NO: 43 - RNA, 23 nt, synthetic construct
  source 1..23: mol_type = other RNA
agtctttcagggaactgaagcca

SEQ ID NO: 44 - RNA, 21 nt, synthetic construct
  source 1..21: mol_type = other RNA
gatggcttcagttccctgaat

SEQ ID NO: 45 - RNA, 23 nt, synthetic construct
  source 1..23: mol_type = other RNA
attcagggaactgaagccatcgg

SEQ ID NO: 46 - RNA, 21 nt, synthetic construct
  source 1..21: mol_type = other RNA
aagggacagtattctcagtgt

SEQ ID NO: 47 - RNA, 23 nt, synthetic construct
  source 1..23: mol_type = other RNA
acactgagaatactgtccctttt

SEQ ID NO: 48 - RNA, 21 nt, synthetic construct
  source 1..21: mol_type = other RNA
cttaaaagggacagtattctt

SEQ ID NO: 49 - RNA, 23 nt, synthetic construct
  source 1..23: mol_type = other RNA
aagaatactgtcccttttaagca

SEQ ID NO: 50 - RNA, 21 nt, synthetic construct
  source 1..21: mol_type = other RNA
ctcccaataaagctggacaat

SEQ ID NO: 51 - RNA, 23 nt, synthetic construct
  source 1..23: mol_type = other RNA
attgtccagctttattgggaggc

SEQ ID NO: 52 - RNA, 21 nt, synthetic construct
  source 1..21: mol_type = other RNA
tgcttaaaagggacagtattt

SEQ ID NO: 53 - RNA, 23 nt, synthetic construct
  source 1..23: mol_type = other RNA
aaatactgtcccttttaagcaac

SEQ ID NO: 54 - RNA, 21 nt, synthetic construct
  source 1..21: mol_type = other RNA
cctcccaataaagctggacat

SEQ ID NO: 55 - RNA, 23 nt, synthetic construct
  source 1..23: mol_type = other RNA
atgtccagctttattgggaggcc

SEQ ID NO: 56 - RNA, 21 nt, synthetic construct
  source 1..21: mol_type = other RNA
gcttaaaagggacagtattct

SEQ ID NO: 57 - RNA, 23 nt, synthetic construct
  source 1..23: mol_type = other RNA
agaatactgtcccttttaagcaa

SEQ ID NO: 58 - RNA, 17 nt, synthetic construct
  source 1..17: mol_type = other RNA
tagaatactgtcccttt

SEQ ID NO: 59 - RNA, 21 nt, synthetic construct
  source 1..21: mol_type = other RNA
cccaataaagctggacaagat

SEQ ID NO: 60 - RNA, 23 nt, synthetic construct
  source 1..23: mol_type = other RNA
atcttgtccagctttattgggag

SEQ ID NO: 61 - RNA, 21 nt, synthetic construct
  source 1..21: mol_type = other RNA
ctggagcaccgttaaggacat

SEQ ID NO: 62 - RNA, 23 nt, synthetic construct
  source 1..23: mol_type = other RNA
atgtccttaacggtgctccagta

SEQ ID NO: 63 - RNA, 21 nt, synthetic construct
  source 1..21: mol_type = other RNA
aaagggacagtattctcagtt

SEQ ID NO: 64 - RNA, 23 nt, synthetic construct
  source 1..23: mol_type = other RNA
aactgagaatactgtccctttta

SEQ ID NO: 65 - RNA, 21 nt, synthetic construct
  source 1..21: mol_type = other RNA
gtgaccgatggcttcagttct

SEQ ID NO: 66 - RNA, 23 nt, synthetic construct
  source 1..23: mol_type = other RNA
agaactgaagccatcggtcaccc

SEQ ID NO: 67 - RNA, 21 nt, synthetic construct
  source 1..21: mol_type = other RNA
tcccaataaagctggacaagt

SEQ ID NO: 68 - RNA, 23 nt, synthetic construct
  source 1..23: mol_type = other RNA
acttgtccagctttattgggagg

SEQ ID NO: 69 - RNA, 21 nt, synthetic construct
  source 1..21: mol_type = other RNA
ggttgcttaaaagggacagtt

SEQ ID NO: 70 - RNA, 23 nt, synthetic construct
  source 1..23: mol_type = other RNA
aactgtcccttttaagcaaccta

SEQ ID NO: 71 - RNA, 21 nt, synthetic construct
  source 1..21: mol_type = other RNA
tcagttccctgaaagactact

SEQ ID NO: 72 - RNA, 23 nt, synthetic construct
  source 1..23: mol_type = other RNA
agtagtctttcagggaactgaag

SEQ ID NO: 73 - RNA, 21 nt, synthetic construct
  source 1..21: mol_type = other RNA
agactactggagcaccgttat

SEQ ID NO: 74 - RNA, 23 nt, synthetic construct
  source 1..23: mol_type = other RNA
ataacggtgctccagtagtcttt

SEQ ID NO: 75 - RNA, 21 nt, synthetic construct
  source 1..21: mol_type = other RNA
ccaccaagaccgccaaggatt

SEQ ID NO: 76 - RNA, 23 nt, synthetic construct
  source 1..23: mol_type = other RNA
aatccttggcggtcttggtggcg

SEQ ID NO: 77 - RNA, 21 nt, synthetic construct
  source 1..21: mol_type = other RNA
tgaccgatggcttcagttcct

SEQ ID NO: 78 - RNA, 23 nt, synthetic construct
  source 1..23: mol_type = other RNA
aggaactgaagccatcggtcacc

SEQ ID NO: 79 - RNA, 21 nt, synthetic construct
  source 1..21: mol_type = other RNA
ctgggtgaccgatggcttcat

SEQ ID NO: 80 - RNA, 23 nt, synthetic construct
  source 1..23: mol_type = other RNA
atgaagccatcggtcacccagcc

SEQ ID NO: 81 - RNA, 21 nt, synthetic construct
  source 1..21: mol_type = other RNA
caataaagctggacaagaagt

SEQ ID NO: 82 - RNA, 23 nt, synthetic construct
  source 1..23: mol_type = other RNA
acttcttgtccagctttattggg

SEQ ID NO: 83 - RNA, 21 nt, synthetic construct
  source 1..21: mol_type = other RNA
cgatggcttcagttccctgat

SEQ ID NO: 84 - RNA, 23 nt, synthetic construct
  source 1..23: mol_type = other RNA
atcagggaactgaagccatcggt

SEQ ID NO: 85 - RNA, 21 nt, synthetic construct
  source 1..21: mol_type = other RNA
agggacagtattctcagtgct

SEQ ID NO: 86 - RNA, 23 nt, synthetic construct
  source 1..23: mol_type = other RNA
agcactgagaatactgtcccttt

SEQ ID NO: 87 - RNA, 21 nt, synthetic construct
  source 1..21: mol_type = other RNA
ctgaaagactactggagcact

SEQ ID NO: 88 - RNA, 23 nt, synthetic construct
  source 1..23: mol_type = other RNA
agtgctccagtagtctttcaggg

SEQ ID NO: 89 - RNA, 21 nt, synthetic construct
  source 1..21: mol_type = other RNA
ataaagctggacaagaagctt

SEQ ID NO: 90 - RNA, 23 nt, synthetic construct
  source 1..23: mol_type = other RNA
aagcttcttgtccagctttattg

SEQ ID NO: 91 - RNA, 21 nt, synthetic construct
  source 1..21: mol_type = other RNA
aagactactggagcaccgttt

SEQ ID NO: 92 - RNA, 23 nt, synthetic construct
  source 1..23: mol_type = other RNA
aaacggtgctccagtagtctttc

SEQ ID NO: 93 - RNA, 21 nt, synthetic construct
  source 1..21: mol_type = other RNA
tggcttcagttccctgaaagt

SEQ ID NO: 94 - RNA, 23 nt, synthetic construct
  source 1..23: mol_type = other RNA
actttcagggaactgaagccatc

SEQ ID NO: 95 - RNA, 21 nt, synthetic construct
  source 1..21: mol_type = other RNA
gcctcccaataaagctggact

SEQ ID NO: 96 - RNA, 23 nt, synthetic construct
  source 1..23: mol_type = other RNA
agtccagctttattgggaggcca

SEQ ID NO: 97 - RNA, 21 nt, synthetic construct
  source 1..21: mol_type = other RNA
agttccctgaaagactactgt

SEQ ID NO: 98 - RNA, 23 nt, synthetic construct
  source 1..23: mol_type = other RNA
acagtagtctttcagggaactga

SEQ ID NO: 99 - RNA, 21 nt, synthetic construct
  source 1..21: mol_type = other RNA
aagctggacaagaagctgctt

SEQ ID NO: 100 - RNA, 23 nt, synthetic construct
  source 1..23: mol_type = other RNA
aagcagcttcttgtccagcttta

SEQ ID NO: 101 - RNA, 21 nt, synthetic construct
  source 1..21: mol_type = other RNA
gctggacaagaagctgctata

SEQ ID NO: 102 - RNA, 23 nt, synthetic construct
  source 1..23: mol_type = other RNA
tatagcagcttcttgtccagctt

SEQ ID NO: 103 - RNA, 21 nt, synthetic construct
  source 1..21: mol_type = other RNA
ccctgaaagactactggagct

SEQ ID NO: 104 - RNA, 23 nt, synthetic construct
  source 1..23: mol_type = other RNA
agctccagtagtctttcagggaa

SEQ ID NO: 105 - RNA, 21 nt, synthetic construct
  source 1..21: mol_type = other RNA
aataaagctggacaagaagct

SEQ ID NO: 106 - RNA, 23 nt, synthetic construct
  source 1..23: mol_type = other RNA
agcttcttgtccagctttattgg

SEQ ID NO: 107 - RNA, 21 nt, synthetic construct
  source 1..21: mol_type = other RNA
ggctgggtgaccgatggcttt

SEQ ID NO: 108 - RNA, 23 nt, synthetic construct
  source 1..23: mol_type = other RNA
aaagccatcggtcacccagcccc

SEQ ID NO: 109 - RNA, 21 nt, synthetic construct
  source 1..21: mol_type = other RNA
cagttccctgaaagactactt

SEQ ID NO: 110 - RNA, 23 nt, synthetic construct
  source 1..23: mol_type = other RNA
aagtagtctttcagggaactgaa

SEQ ID NO: 111 - RNA, 21 nt, synthetic construct
  source 1..21: mol_type = other RNA
cctgaaagactactggagcat

SEQ ID NO: 112 - RNA, 23 nt, synthetic construct
  source 1..23: mol_type = other RNA
atgctccagtagtctttcaggga

SEQ ID NO: 113 - RNA, 21 nt, synthetic construct
  source 1..21: mol_type = other RNA
catccctagaggcagctgctt

SEQ ID NO: 114 - RNA, 23 nt, synthetic construct
  source 1..23: mol_type = other RNA
aagcagctgcctctagggatgaa

SEQ ID NO: 115 - RNA, 21 nt, synthetic construct
  source 1..21: mol_type = other RNA
ctgcctgagacctcaatacct

SEQ ID NO: 116 - RNA, 23 nt, synthetic construct
  source 1..23: mol_type = other RNA
aggtattgaggtctcaggcagcc

SEQ ID NO: 117 - RNA, 21 nt, synthetic construct
  source 1..21: mol_type = other RNA
aaagctggacaagaagctgct

SEQ ID NO: 118 - RNA, 23 nt, synthetic construct
  source 1..23: mol_type = other RNA
agcagcttcttgtccagctttat

SEQ ID NO: 119 - RNA, 21 nt, synthetic construct
  source 1..21: mol_type = other RNA
ttccctgaaagactactggat

SEQ ID NO: 120 - RNA, 23 nt, synthetic construct
  source 1..23: mol_type = other RNA
atccagtagtctttcagggaact

SEQ ID NO: 121 - RNA, 21 nt, synthetic construct
  source 1..21: mol_type = other RNA
taggttgcttaaaagggacat

SEQ ID NO: 122 - RNA, 23 nt, synthetic construct
  source 1..23: mol_type = other RNA
atgtcccttttaagcaacctaca

SEQ ID NO: 123 - RNA, 21 nt, synthetic construct
  source 1..21: mol_type = other RNA
caccaagaccgccaaggatgt

SEQ ID NO: 124 - RNA, 23 nt, synthetic construct
  source 1..23: mol_type = other RNA
acatccttggcggtcttggtggc

SEQ ID NO: 125 - RNA, 21 nt, synthetic construct
  source 1..21: mol_type = other RNA
aggttgcttaaaagggacagt

SEQ ID NO: 126 - RNA, 23 nt, synthetic construct
  source 1..23: mol_type = other RNA
actgtcccttttaagcaacctac

SEQ ID NO: 127 - RNA, 21 nt, synthetic construct
  source 1..21: mol_type = other RNA
agctggacaagaagctgctat

SEQ ID NO: 128 - RNA, 23 nt, synthetic construct
  source 1..23: mol_type = other RNA
atagcagcttcttgtccagcttt

SEQ ID NO: 129 - RNA, 21 nt, synthetic construct
  source 1..21: mol_type = other RNA
ccctagaggcagctgctccat

SEQ ID NO: 130 - RNA, 23 nt, synthetic construct
  source 1..23: mol_type = other RNA
atggagcagctgcctctagggat

SEQ ID NO: 131 - RNA, 21 nt, synthetic construct
  source 1..21: mol_type = other RNA
tggagcaccgttaaggacaat

SEQ ID NO: 132 - RNA, 23 nt, synthetic construct
  source 1..23: mol_type = other RNA
attgtccttaacggtgctccagt

SEQ ID NO: 133 - RNA, 21 nt, synthetic construct
  source 1..21: mol_type = other RNA
gaccgccaaggatgcactgat

SEQ ID NO: 134 - RNA, 23 nt, synthetic construct
  source 1..23: mol_type = other RNA
atcagtgcatccttggcggtctt

SEQ ID NO: 135 - RNA, 21 nt, synthetic construct
  source 1..21: mol_type = other RNA
taaagctggacaagaagctgt

SEQ ID NO: 136 - RNA, 23 nt, synthetic construct
  source 1..23: mol_type = other RNA
acagcttcttgtccagctttatt

SEQ ID NO: 137 - RNA, 21 nt, synthetic construct
  source 1..21: mol_type = other RNA
tccctgaaagactactggagt

SEQ ID NO: 138 - RNA, 23 nt, synthetic construct
  source 1..23: mol_type = other RNA
actccagtagtctttcagggaac

SEQ ID NO: 139 - RNA, 21 nt, synthetic construct
  source 1..21: mol_type = other RNA
gaccgatggcttcagttccct

SEQ ID NO: 140 - RNA, 23 nt, synthetic construct
  source 1..23: mol_type = other RNA
agggaactgaagccatcggtcac

SEQ ID NO: 141 - RNA, 21 nt, synthetic construct
  source 1..21: mol_type = other RNA
tccctagaggcagctgctcct

SEQ ID NO: 142 - RNA, 23 nt, synthetic construct
  source 1..23: mol_type = other RNA
aggagcagctgcctctagggatg

SEQ ID NO: 143 - RNA, 21 nt, synthetic construct
  source 1..21: mol_type = other RNA
ccgatggcttcagttccctgt

SEQ ID NO: 144 - RNA, 23 nt, synthetic construct
  source 1..23: mol_type = other RNA
acagggaactgaagccatcggtc

SEQ ID NO: 145 - RNA, 21 nt, synthetic construct
  source 1..21: mol_type = other RNA
gtaggttgcttaaaagggact

SEQ ID NO: 146 - RNA, 23 nt, synthetic construct
  source 1..23: mol_type = other RNA
agtcccttttaagcaacctacag

SEQ ID NO: 147 - RNA, 21 nt, synthetic construct
  source 1..21: mol_type = other RNA
cctagaggcagctgctccagt

SEQ ID NO: 148 - RNA, 23 nt, synthetic construct
  source 1..23: mol_type = other RNA
actggagcagctgcctctaggga

SEQ ID NO: 149 - RNA, 21 nt, synthetic construct
  source 1..21: mol_type = other RNA
tgtaggttgcttaaaagggat

SEQ ID NO: 150 - RNA, 23 nt, synthetic construct
  source 1..23: mol_type = other RNA
atcccttttaagcaacctacagg

SEQ ID NO: 151 - RNA, 21 nt, synthetic construct
  source 1..21: mol_type = other RNA
aaagactactggagcaccgtt

SEQ ID NO: 152 - RNA, 23 nt, synthetic construct
  source 1..23: mol_type = other RNA
aacggtgctccagtagtctttca

SEQ ID NO: 153 - RNA, 21 nt, synthetic construct
  source 1..21: mol_type = other RNA
aggcagctgctccaggaacat

SEQ ID NO: 154 - RNA, 23 nt, synthetic construct
  source 1..23: mol_type = other RNA
atgttcctggagcagctgcctct

SEQ ID NO: 155 - RNA, 21 nt, synthetic construct
  source 1..21: mol_type = other RNA
gcagctgctccaggaacagat

SEQ ID NO: 156 - RNA, 23 nt, synthetic construct
  source 1..23: mol_type = other RNA
atctgttcctggagcagctgcct

SEQ ID NO: 157 - RNA, 21 nt, synthetic construct
  source 1..21: mol_type = other RNA
cgccaccaagaccgccaaggt

SEQ ID NO: 158 - RNA, 23 nt, synthetic construct
  source 1..23: mol_type = other RNA
accttggcggtcttggtggcgtg

SEQ ID NO: 159 - RNA, 21 nt, synthetic construct
  source 1..21: mol_type = other RNA
ctactggagcaccgttaaggt

SEQ ID NO: 160 - RNA, 23 nt, synthetic construct
  source 1..23: mol_type = other RNA
accttaacggtgctccagtagtc

SEQ ID NO: 161 - RNA, 21 nt, synthetic construct
  source 1..21: mol_type = other RNA
tggctgcctgagacctcaatt

SEQ ID NO: 162 - RNA, 23 nt, synthetic construct
  source 1..23: mol_type = other RNA
aattgaggtctcaggcagccacg

SEQ ID NO: 163 - RNA, 21 nt, synthetic construct
  source 1..21: mol_type = other RNA
ggcttcagttccctgaaagat

SEQ ID NO: 164 - RNA, 23 nt, synthetic construct
  source 1..23: mol_type = other RNA
atctttcagggaactgaagccat

SEQ ID NO: 165 - RNA, 21 nt, synthetic construct
  source 1..21: mol_type = other RNA
atccctagaggcagctgctct

SEQ ID NO: 166 - RNA, 23 nt, synthetic construct
  source 1..23: mol_type = other RNA
agagcagctgcctctagggatga

SEQ ID NO: 167 - RNA, 21 nt, synthetic construct
  source 1..21: mol_type = other RNA
tgaaagactactggagcacct

SEQ ID NO: 168 - RNA, 23 nt, synthetic construct
  source 1..23: mol_type = other RNA
aggtgctccagtagtctttcagg

SEQ ID NO: 169 - RNA, 21 nt, synthetic construct
  source 1..21: mol_type = other RNA
aagaccgccaaggatgcactt

SEQ ID NO: 170 - RNA, 23 nt, synthetic construct
  source 1..23: mol_type = other RNA
aagtgcatccttggcggtcttgg

SEQ ID NO: 171 - RNA, 21 nt, synthetic construct
  source 1..21: mol_type = other RNA
gctgcctgagacctcaatact

SEQ ID NO: 172 - RNA, 23 nt, synthetic construct
  source 1..23: mol_type = other RNA
agtattgaggtctcaggcagcca

SEQ ID NO: 173 - RNA, 21 nt, synthetic construct
  source 1..21: mol_type = other RNA
ggcctcccaataaagctggat

SEQ ID NO: 174 - RNA, 23 nt, synthetic construct
  source 1..23: mol_type = other RNA
atccagctttattgggaggccag

SEQ ID NO: 175 - RNA, 21 nt, synthetic construct
  source 1..21: mol_type = other RNA
cagttcatccctagaggcagt

SEQ ID NO: 176 - RNA, 23 nt, synthetic construct
  source 1..23: mol_type = other RNA
actgcctctagggatgaactgag

SEQ ID NO: 177 - RNA, 21 nt, synthetic construct
  source 1..21: mol_type = other RNA
ggctgcctgagacctcaatat

SEQ ID NO: 178 - RNA, 23 nt, synthetic construct
  source 1..23: mol_type = other RNA
atattgaggtctcaggcagccac

SEQ ID NO: 179 - RNA, 21 nt, synthetic construct
  source 1..21: mol_type = other RNA
gaaagactactggagcaccgt

SEQ ID NO: 180 - RNA, 23 nt, synthetic construct
  source 1..23: mol_type = other RNA
acggtgctccagtagtctttcag

SEQ ID NO: 181 - RNA, 21 nt, synthetic construct
  source 1..21: mol_type = other RNA
gaggcagctgctccaggaact

SEQ ID NO: 182 - RNA, 23 nt, synthetic construct
  source 1..23: mol_type = other RNA
agttcctggagcagctgcctcta

SEQ ID NO: 183 - RNA, 21 nt, synthetic construct
  source 1..21: mol_type = other RNA
gtggctgcctgagacctcaat

SEQ ID NO: 184 - RNA, 23 nt, synthetic construct
  source 1..23: mol_type = other RNA
attgaggtctcaggcagccacgg

SEQ ID NO: 185 - RNA, 21 nt, synthetic construct
  source 1..21: mol_type = other RNA
gctgggtgaccgatggcttct

SEQ ID NO: 186 - RNA, 23 nt, synthetic construct
  source 1..23: mol_type = other RNA
agaagccatcggtcacccagccc

SEQ ID NO: 187 - RNA, 21 nt, synthetic construct
  source 1..21: mol_type = other RNA
ggagcaccgttaaggacaagt

SEQ ID NO: 188 - RNA, 23 nt, synthetic construct
  source 1..23: mol_type = other RNA
acttgtccttaacggtgctccag

SEQ ID NO: 189 - RNA, 21 nt, synthetic construct
  source 1..21: mol_type = other RNA
ctgtaggttgcttaaaagggt

SEQ ID NO: 190 - RNA, 23 nt, synthetic construct
  source 1..23: mol_type = other RNA
acccttttaagcaacctacaggg

SEQ ID NO: 191 - RNA, 21 nt, synthetic construct
  source 1..21: mol_type = other RNA
gttccctgaaagactactggt

SEQ ID NO: 192 - RNA, 23 nt, synthetic construct
  source 1..23: mol_type = other RNA
accagtagtctttcagggaactg

SEQ ID NO: 193 - RNA, 21 nt, synthetic construct
  source 1..21: mol_type = other RNA
gggctgggtgaccgatggctt

SEQ ID NO: 194 - RNA, 23 nt, synthetic construct
  source 1..23: mol_type = other RNA
aagccatcggtcacccagcccct

SEQ ID NO: 195 - RNA, 21 nt, synthetic construct
  source 1..21: mol_type = other RNA
gccaccaagaccgccaaggat

SEQ ID NO: 196 - RNA, 23 nt, synthetic construct
  source 1..23: mol_type = other RNA
atccttggcggtcttggtggcgt

SEQ ID NO: 197 - RNA, 21 nt, synthetic construct
  source 1..21: mol_type = other RNA
agaggcagctgctccaggaat

SEQ ID NO: 198 - RNA, 23 nt, synthetic construct
  source 1..23: mol_type = other RNA
attcctggagcagctgcctctag

SEQ ID NO: 199 - RNA, 21 nt, synthetic construct
  source 1..21: mol_type = other RNA
tcatccctagaggcagctgct

SEQ ID NO: 200 - RNA, 23 nt, synthetic construct
  source 1..23: mol_type = other RNA
agcagctgcctctagggatgaac

SEQ ID NO: 201 - RNA, 21 nt, synthetic construct
  source 1..21: mol_type = other RNA
ttcatccctagaggcagctgt

SEQ ID NO: 202 - RNA, 23 nt, synthetic construct
  source 1..23: mol_type = other RNA
acagctgcctctagggatgaact

SEQ ID NO: 203 - RNA, 21 nt, synthetic construct
  source 1..21: mol_type = other RNA
cgagctccttgggtcctgcat

SEQ ID NO: 204 - RNA, 23 nt, synthetic construct
  source 1..23: mol_type = other RNA
atgcaggacccaaggagctcgca

SEQ ID NO: 205 - RNA, 21 nt, synthetic construct
  source 1..21: mol_type = other RNA
ggcagctgctccaggaacagt

SEQ ID NO: 206 - RNA, 23 nt, synthetic construct
  source 1..23: mol_type = other RNA
actgttcctggagcagctgcctc

SEQ ID NO: 207 - RNA, 21 nt, synthetic construct
  source 1..21: mol_type = other RNA
ccaagaccgccaaggatgcat

SEQ ID NO: 208 - RNA, 23 nt, synthetic construct
  source 1..23: mol_type = other RNA
atgcatccttggcggtcttggtg

SEQ ID NO: 209 - RNA, 21 nt, synthetic construct
  source 1..21: mol_type = other RNA
gactactggagcaccgttaat

SEQ ID NO: 210 - RNA, 23 nt, synthetic construct
  source 1..23: mol_type = other RNA
attaacggtgctccagtagtctt

SEQ ID NO: 211 - RNA, 21 nt, synthetic construct
  source 1..21: mol_type = other RNA
agttcatccctagaggcagct

SEQ ID NO: 212 - RNA, 23 nt, synthetic construct
  source 1..23: mol_type = other RNA
agctgcctctagggatgaactga

SEQ ID NO: 213 - RNA, 21 nt, synthetic construct
  source 1..21: mol_type = other RNA
actggagcaccgttaaggact

SEQ ID NO: 214 - RNA, 23 nt, synthetic construct
  source 1..23: mol_type = other RNA
agtccttaacggtgctccagtag

SEQ ID NO: 215 - RNA, 21 nt, synthetic construct
  source 1..21: mol_type = other RNA
tgggtgaccgatggcttcagt

SEQ ID NO: 216 - RNA, 23 nt, synthetic construct
  source 1..23: mol_type = other RNA
actgaagccatcggtcacccagc

SEQ ID NO: 217 - RNA, 21 nt, synthetic construct
  source 1..21: mol_type = other RNA
ccgagcttcagaggccgaggt

SEQ ID NO: 218 - RNA, 23 nt, synthetic construct
  source 1..23: mol_type = other RNA
acctcggcctctgaagctcgggc

SEQ ID NO: 219 - RNA, 21 nt, synthetic construct
  source 1..21: mol_type = other RNA
accaagaccgccaaggatgct

SEQ ID NO: 220 - RNA, 23 nt, synthetic construct
  source 1..23: mol_type = other RNA
agcatccttggcggtcttggtgg

SEQ ID NO: 221 - RNA, 21 nt, synthetic construct
  source 1..21: mol_type = other RNA
tagaggcagctgctccaggat

SEQ ID NO: 222 - RNA, 23 nt, synthetic construct
  source 1..23: mol_type = other RNA
atcctggagcagctgcctctagg

SEQ ID NO: 223 - RNA, 21 nt, synthetic construct
  source 1..21: mol_type = other RNA
gggtgaccgatggcttcagtt

SEQ ID NO: 224 - RNA, 23 nt, synthetic construct
  source 1..23: mol_type = other RNA
aactgaagccatcggtcacccag

SEQ ID NO: 225 - RNA, 21 nt, synthetic construct
  source 1..21: mol_type = other RNA
gttcatccctagaggcagctt

SEQ ID NO: 226 - RNA, 23 nt, synthetic construct
  source 1..23: mol_type = other RNA
aagctgcctctagggatgaactg

SEQ ID NO: 227 - RNA, 21 nt, synthetic construct
  source 1..21: mol_type = other RNA
actactggagcaccgttaagt

SEQ ID NO: 228 - RNA, 23 nt, synthetic construct
  source 1..23: mol_type = other RNA
acttaacggtgctccagtagtct

SEQ ID NO: 229 - RNA, 21 nt, synthetic construct
  source 1..21: mol_type = other RNA
cagctgctccaggaacagagt

SEQ ID NO: 230 - RNA, 23 nt, synthetic construct
  source 1..23: mol_type = other RNA
actctgttcctggagcagctgcc

SEQ ID NO: 231 - RNA, 21 nt, synthetic construct
  source 1..21: mol_type = other RNA
cgagcttcagaggccgaggat

SEQ ID NO: 232 - RNA, 23 nt, synthetic construct
  source 1..23: mol_type = other RNA
atcctcggcctctgaagctcggg

SEQ ID NO: 233 - RNA, 21 nt, synthetic construct
  source 1..21: mol_type = other RNA
ctagaggcagctgctccaggt

SEQ ID NO: 234 - RNA, 23 nt, synthetic construct
  source 1..23: mol_type = other RNA
acctggagcagctgcctctaggg

SEQ ID NO: 235 - RNA, 21 nt, synthetic construct
  source 1..21: mol_type = other RNA
gagtcccaggtggcccagcat

SEQ ID NO: 236 - RNA, 23 nt, synthetic construct
  source 1..23: mol_type = other RNA
atgctgggccacctgggactcct

SEQ ID NO: 237 - RNA, 21 nt, synthetic construct
  source 1..21: mol_type = other RNA
agaccgccaaggatgcactgt

SEQ ID NO: 238 - RNA, 23 nt, synthetic construct
  source 1..23: mol_type = other RNA
acagtgcatccttggcggtcttg

SEQ ID NO: 239 - RNA, 21 nt, synthetic construct
  source 1..21: mol_type = other RNA
ccaggtggcccagcaggccat

SEQ ID NO: 240 - RNA, 23 nt, synthetic construct
  source 1..23: mol_type = other RNA
atggcctgctgggccacctggga

SEQ ID NO: 241 - RNA, 21 nt, synthetic construct
  source 1..21: mol_type = other RNA
acgccaccaagaccgccaagt

SEQ ID NO: 242 - RNA, 23 nt, synthetic construct
  source 1..23: mol_type = other RNA
acttggcggtcttggtggcgtgc

SEQ ID NO: 243 - RNA, 21 nt, synthetic construct
  source 1..21: mol_type = other RNA
ggtgaccgatggcttcagttt

SEQ ID NO: 244 - RNA, 23 nt, synthetic construct
  source 1..23: mol_type = other RNA
aaactgaagccatcggtcaccca

SEQ ID NO: 245 - RNA, 21 nt, synthetic construct
  source 1..21: mol_type = other RNA
tactggagcaccgttaaggat

SEQ ID NO: 246 - RNA, 23 nt, synthetic construct
  source 1..23: mol_type = other RNA
atccttaacggtgctccagtagt

SEQ ID NO: 247 - RNA, 21 nt, synthetic construct
  source 1..21: mol_type = other RNA
ggagtcccaggtggcccagct

SEQ ID NO: 248 - RNA, 23 nt, synthetic construct
  source 1..23: mol_type = other RNA
agctgggccacctgggactcctg

SEQ ID NO: 249 - RNA, 21 nt, synthetic construct
  source 1..21: mol_type = other RNA
gcaggagtcccaggtggccct

SEQ ID NO: 250 - RNA, 23 nt, synthetic construct
  source 1..23: mol_type = other RNA
agggccacctgggactcctgcac

SEQ ID NO: 251 - RNA, 21 nt, synthetic construct
  source 1..21: mol_type = other RNA
tgcaggagtcccaggtggcct

SEQ ID NO: 252 - RNA, 23 nt, synthetic construct
  source 1..23: mol_type = other RNA
aggccacctgggactcctgcacg

SEQ ID NO: 253 - RNA, 21 nt, synthetic construct
  source 1..21: mol_type = other RNA
caggagtcccaggtggcccat

SEQ ID NO: 254 - RNA, 23 nt, synthetic construct
  source 1..23: mol_type = other RNA
atgggccacctgggactcctgca

SEQ ID NO: 255 - RNA, 21 nt, synthetic construct
  source 1..21: mol_type = other RNA
agctgctccaggaacagaggt

SEQ ID NO: 256 - RNA, 23 nt, synthetic construct
  source 1..23: mol_type = other RNA
acctctgttcctggagcagctgc

SEQ ID NO: 257 - RNA, 21 nt, synthetic construct
  source 1..21: mol_type = other RNA
agtcccaggtggcccagcagt

SEQ ID NO: 258 - RNA, 23 nt, synthetic construct
  source 1..23: mol_type = other RNA
actgctgggccacctgggactcc

SEQ ID NO: 259 - RNA, 21 nt, synthetic construct
  source 1..21: mol_type = other RNA
aggagtcccaggtggcccagt

SEQ ID NO: 260 - RNA, 23 nt, synthetic construct
  source 1..23: mol_type = other RNA
actgggccacctgggactcctgc

SEQ ID NO: 261 - RNA, 23 nt, synthetic construct
  source 1..23: mol_type = other RNA
  modified_base 7: mod_base = OTHER; note = 5'-methyluridine-3'-phosphate
aagtctttcagggaactgaagcc

SEQ ID NO: 262 - RNA, 23 nt, synthetic construct
  source 1..23: mol_type = other RNA
  modified_base 7: mod_base = OTHER; note = 5'-methyluridine-3'-phosphate
agtctttcagggaactgaagcca

SEQ ID NO: 263 - RNA, 21 nt, synthetic construct
  source 1..21: mol_type = other RNA
gttgcttaaaagggacagtat

SEQ ID NO: 264 - RNA, 23 nt, synthetic construct
  source 1..23: mol_type = other RNA
  modified_base 7: mod_base = OTHER; note = 5'-methyluridine-3'-phosphate
atactgtcccttttaagcaacct

SEQ ID NO: 265 - RNA, 23 nt, synthetic construct
  source 1..23: mol_type = other RNA
  modified_base 7: mod_base = OTHER; note = 5'-methyluridine-3'-phosphate
atcttgtccagctttattgggag

SEQ ID NO: 266 - RNA, 23 nt, synthetic construct
  source 1..23: mol_type = other RNA
  modified_base 7: mod_base = OTHER; note = 5'-methyluridine-3'-phosphate
atagtctttcagggaactgaagc

SEQ ID NO: 267 - RNA, 23 nt, synthetic construct
  source 1..23: mol_type = other RNA
  modified_base 7: mod_base = OTHER; note = 5'-methyluridine-3'-phosphate
atgtccttaacggtgctccagta

SEQ ID NO: 268 - RNA, 23 nt, synthetic construct
  source 1..23: mol_type = other RNA
  modified_base 7: mod_base = OTHER; note = 5'-methyluridine-3'-phosphate
aggaactgaagccatcggtcacc

SEQ ID NO: 269 - RNA, 23 nt, synthetic construct
  source 1..23: mol_type = other RNA
  modified_base 7: mod_base = OTHER; note = 5'-methyluridine-3'-phosphate
agcttcttgtccagctttattgg

SEQ ID NO: 270 - RNA, 21 nt, synthetic construct
  source 1..21: mol_type = other RNA
gagcaccgttaaggacaagtt

SEQ ID NO: 271 - RNA, 23 nt, synthetic construct
  source 1..23: mol_type = other RNA
  modified_base 7: mod_base = OTHER; note = 5'-methyluridine-3'-phosphate
aacttgtccttaacggtgctcca

SEQ ID NO: 272 - RNA, 23 nt, synthetic construct
  source 1..23: mol_type = other RNA
  modified_base 7: mod_base = OTHER; note = 5'-methyluridine-3'-phosphate
acttcttgtccagctttattggg

SEQ ID NO: 273 - RNA, 23 nt, synthetic construct
  source 1..23: mol_type = other RNA
  modified_base 7: mod_base = OTHER; note = 5'-methyluridine-3'-phosphate
agcagcttcttgtccagctttat

SEQ ID NO: 274 - RNA, 23 nt, synthetic construct
  source 1..23: mol_type = other RNA
  modified_base 7: mod_base = OTHER; note = 5'-methyluridine-3'-phosphate
actgcctctagggatgaactgag

SEQ ID NO: 275 - RNA, 23 nt, synthetic construct
  source 1..23: mol_type = other RNA
  modified_base 7: mod_base = OTHER; note = 5'-methyluridine-3'-phosphate
acagcttcttgtccagctttatt

SEQ ID NO: 276 - RNA, 23 nt, synthetic construct
  source 1..23: mol_type = other RNA
  modified_base 7: mod_base = OTHER; note = 5'-methyluridine-3'-phosphate
aaatactgtcccttttaagcaac

SEQ ID NO: 277 - RNA, 23 nt, synthetic construct
  source 1..23: mol_type = other RNA
  modified_base 7: mod_base = OTHER; note = 5'-methyluridine-3'-phosphate
aggtgctccagtagtctttcagg

SEQ ID NO: 278 - RNA, 23 nt, synthetic construct
  source 1..23: mol_type = other RNA
  modified_base 7: mod_base = OTHER; note = 5'-methyluridine-3'-phosphate
aggtattgaggtctcaggcagcc

SEQ ID NO: 279 - RNA, 23 nt, synthetic construct
  source 1..23: mol_type = other RNA
  modified_base 7: mod_base = OTHER; note = 5'-methyluridine-3'-phosphate
aatccttggcggtcttggtggcg

SEQ ID NO: 280 - RNA, 23 nt, synthetic construct
  source 1..23: mol_type = other RNA
  modified_base 7: mod_base = OTHER; note = 5'-methyluridine-3'-phosphate
aagtagtctttcagggaactgaa

SEQ ID NO: 281 - RNA, 23 nt, synthetic construct
  source 1..23: mol_type = other RNA
  modified_base 7: mod_base = OTHER; note = 5'-methyluridine-3'-phosphate
atcccttttaagcaacctacagg

SEQ ID NO: 282 - RNA, 23 nt, synthetic construct
  source 1..23: mol_type = other RNA
  modified_base 7: mod_base = OTHER; note = 5'-methyluridine-3'-phosphate
aaacggtgctccagtagtctttc

SEQ ID NO: 283 - RNA, 23 nt, synthetic construct
  source 1..23: mol_type = other RNA
  modified_base 7: mod_base = OTHER; note = 5'-methyluridine-3'-phosphate
agttcctggagcagctgcctcta

SEQ ID NO: 284 - RNA, 21 nt, synthetic construct
  source 1..21: mol_type = other RNA
caagaccgccaaggatgcact

SEQ ID NO: 285 - RNA, 23 nt, synthetic construct
  source 1..23: mol_type = other RNA
  modified_base 7: mod_base = OTHER; note = 5'-methyluridine-3'-phosphate
agtgcatccttggcggtcttggt

SEQ ID NO: 286 - RNA, 23 nt, synthetic construct
  source 1..23: mol_type = other RNA
  modified_base 7: mod_base = OTHER; note = 5'-methyluridine-3'-phosphate
acatccttggcggtcttggtggc

SEQ ID NO: 287 - RNA, 23 nt, synthetic construct
  source 1..23: mol_type = other RNA
  modified_base 7: mod_base = OTHER; note = 5'-methyluridine-3'-phosphate
atctgttcctggagcagctgcct

SEQ ID NO: 288 - RNA, 23 nt, synthetic construct
  source 1..23: mol_type = other RNA
  modified_base 7: mod_base = OTHER; note = 5'-methyluridine-3'-phosphate
agcagctgcctctagggatgaac

SEQ ID NO: 289 - RNA, 23 nt, synthetic construct
  source 1..23: mol_type = other RNA
  modified_base 7: mod_base = OTHER; note = 5'-methyluridine-3'-phosphate
atccagtagtctttcagggaact

SEQ ID NO: 290 - RNA, 23 nt, synthetic construct
  source 1..23: mol_type = other RNA
  modified_base 7: mod_base = OTHER; note = 5'-methyluridine-3'-phosphate
agagaatactgtcccttttaagc

SEQ ID NO: 291 - RNA, 23 nt, synthetic construct
  source 1..23: mol_type = other RNA
  modified_base 7: mod_base = OTHER; note = 5'-methyluridine-3'-phosphate
acccttttaagcaacctacaggg

SEQ ID NO: 292 - RNA, 23 nt, synthetic construct
  source 1..23: mol_type = other RNA
  modified_base 7: mod_base = OTHER; note = 5'-methyluridine-3'-phosphate
agtccttaacggtgctccagtag

SEQ ID NO: 293 - RNA, 23 nt, synthetic construct
  source 1..23: mol_type = other RNA
  modified_base 7: mod_base = OTHER; note = 5'-methyluridine-3'-phosphate
agtcccttttaagcaacctacag

SEQ ID NO: 294 - RNA, 23 nt, synthetic construct
  source 1..23: mol_type = other RNA
  modified_base 7: mod_base = OTHER; note = 5'-methyluridine-3'-phosphate
actctgttcctggagcagctgcc

SEQ ID NO: 295 - RNA, 21 nt, synthetic construct
  source 1..21: mol_type = other RNA
ttgcttaaaagggacagtatt

SEQ ID NO: 296 - RNA, 23 nt, synthetic construct
  source 1..23: mol_type = other RNA
aatactgtcccttttaagcaacc

SEQ ID NO: 297 - RNA, 23 nt, synthetic construct
  source 1..23: mol_type = other RNA
  modified_base 7: mod_base = OTHER; note = 5'-methyluridine-3'-phosphate
atggcctgctgggccacctggga

SEQ ID NO: 298 - RNA, 23 nt, synthetic construct
  source 1..23: mol_type = other RNA
  modified_base 7: mod_base = OTHER; note = 5'-methyluridine-3'-phosphate
aagccatcggtcacccagcccct

SEQ ID NO: 299 - RNA, 19 nt, synthetic construct
  source 1..19: mol_type = other RNA
taaaagggacagtattcta

SEQ ID NO: 300 - RNA, 21 nt, synthetic construct
  source 1..21: mol_type = other RNA
tagaatactgtcccttttaag

SEQ ID NO: 301 - RNA, 23 nt, synthetic construct
  source 1..23: mol_type = other RNA
  modified_base 5: mod_base = OTHER; note = 5'-methyluridine-3'-phosphate
agaatactgtcccttttaagcaa

SEQ ID NO: 302 - RNA, 23 nt, synthetic construct
  source 1..23: mol_type = other RNA
agaatactgtcccttttaagcgc

SEQ ID NO: 303 - RNA, 23 nt, synthetic construct
  source 1..23: mol_type = other RNA
  modified_base 5: mod_base = OTHER; note = 5'-methyluridine-3'-phosphate
agaatactgtcccttttaagcgc

SEQ ID NO: 304 - RNA, 19 nt, synthetic construct
  source 1..19: mol_type = other RNA
ttaaaagggacagtattct

SEQ ID NO: 305 - RNA, 21 nt, synthetic construct
  source 1..21: mol_type = other RNA
agaatactgtcccttttaagc

SEQ ID NO: 306 - RNA, 21 nt, synthetic construct
  source 1..21: mol_type = other RNA
  modified_base 5: mod_base = OTHER; note = 5'-methyluridine-3'-phosphate
agaatactgtcccttttaagc

SEQ ID NO: 307 - RNA, 21 nt, synthetic construct
  source 1..21: mol_type = other RNA
taaaagggacagtattttcat

SEQ ID NO: 308 - RNA, 23 nt, synthetic construct
  source 1..23: mol_type = other RNA
atgaaaatactgtcccttttaag

SEQ ID NO: 309 - RNA, 23 nt, synthetic construct
  source 1..23: mol_type = other RNA
atgagaatactgtcccttttacc

SEQ ID NO: 310 - RNA, 19 nt, synthetic construct
  source 1..19: mol_type = other RNA
aaagggacagtattctcat

SEQ ID NO: 311 - RNA, 21 nt, synthetic construct
  source 1..21: mol_type = other RNA
atgagaatactgtcccttttg

SEQ ID NO: 312 - RNA, 21 nt, synthetic construct
  source 1..21: mol_type = other RNA
aaaaagggacagtattctcat

SEQ ID NO: 313 - RNA, 23 nt, synthetic construct
  source 1..23: mol_type = other RNA
atgagaatactgtcccttttgcc

SEQ ID NO: 314 - RNA, 21 nt, synthetic construct
  source 1..21: mol_type = other RNA
  modified_base 13: mod_base = OTHER; note = 5'-methyluridine-3'-phosphate
taaaagggacagtattctcat

SEQ ID NO: 315 - RNA, 23 nt, synthetic construct
  source 1..23: mol_type = other RNA
aagaatactgtcccttttaagcc

SEQ ID NO: 316 - RNA, 19 nt, synthetic construct
  source 1..19: mol_type = other RNA
taaaagggacagtattctt

SEQ ID NO: 317 - RNA, 21 nt, synthetic construct
  source 1..21: mol_type = other RNA
aagaatactgtcccttttaag

SEQ ID NO: 318 - RNA, 23 nt, synthetic construct
  source 1..23: mol_type = other RNA
actgagaatactgtcccttttgc

SEQ ID NO: 319 - RNA, 23 nt, synthetic construct
  source 1..23: mol_type = other RNA
actgagaatactgtcccttttcc

SEQ ID NO: 320 - RNA, 19 nt, synthetic construct
  source 1..19: mol_type = other RNA
aagggacagtattctcagt

SEQ ID NO: 321 - RNA, 21 nt, synthetic construct
  source 1..21: mol_type = other RNA
actgagaatactgtccctttt

SEQ ID NO: 322 - RNA, 21 nt, synthetic construct
  source 1..21: mol_type = other RNA
aaaagggacagtattttcagt

SEQ ID NO: 323 - RNA, 23 nt, synthetic construct
  source 1..23: mol_type = other RNA
actgaaaatactgtcccttttgc

SEQ ID NO: 324 - RNA, 21 nt, synthetic construct
  source 1..21: mol_type = other RNA
ccaataaagctggataagaat

SEQ ID NO: 325 - RNA, 23 nt, synthetic construct
  source 1..23: mol_type = other RNA
attcttatccagctttattggga

SEQ ID NO: 326 - RNA, 23 nt, synthetic construct
  source 1..23: mol_type = other RNA
  modified_base 5: mod_base = OTHER; note = 5'-methyluridine-3'-phosphate
attcttgtccagctttattggga

SEQ ID NO: 327 - RNA, 23 nt, synthetic construct
  source 1..23: mol_type = other RNA
  modified_base 5: mod_base = OTHER; note = 5'-methyluridine-3'-phosphate
attcttgtccagctttattgggc

SEQ ID NO: 328 - RNA, 19 nt, synthetic construct
  source 1..19: mol_type = other RNA
aataaagctggacaagaat

SEQ ID NO: 329 - RNA, 21 nt, synthetic construct
  source 1..21: mol_type = other RNA
  modified_base 5: mod_base = OTHER; note = 5'-methyluridine-3'-phosphate
attcttgtccagctttattgg

SEQ ID NO: 330 - RNA, 21 nt, synthetic construct
  source 1..21: mol_type = other RNA
  modified_base 5: mod_base = OTHER; note = 5'-methyluridine-3'-phosphate
attcttgtccagctttattcc

SEQ ID NO: 331 - RNA, 23 nt, synthetic construct
  source 1..23: mol_type = other RNA
aagcagcttcttgtccagctttc

SEQ ID NO: 332 - RNA, 23 nt, synthetic construct
  source 1..23: mol_type = other RNA
aagcagcttcttgtccagcttcc

SEQ ID NO: 333 - RNA, 19 nt, synthetic construct
  source 1..19: mol_type = other RNA
gctggacaagaagctgctt

SEQ ID NO: 334 - RNA, 21 nt, synthetic construct
  source 1..21: mol_type = other RNA
aagcagcttcttgtccagctt

SEQ ID NO: 335 - RNA, 21 nt, synthetic construct
  source 1..21: mol_type = other RNA
aagctggacaagaagctactt

SEQ ID NO: 336 - RNA, 23 nt, synthetic construct
  source 1..23: mol_type = other RNA
aagtagcttcttgtccagcttcc

SEQ ID NO: 337 - RNA, 21 nt, synthetic construct
  source 1..21: mol_type = other RNA
aagctggacaagaagttgctt

SEQ ID NO: 338 - RNA, 23 nt, synthetic construct
  source 1..23: mol_type = other RNA
aagcaacttcttgtccagcttcc

SEQ ID NO: 339 - RNA, 20 nt, synthetic construct
  source 1..20: mol_type = other RNA
acgggacagtattctcagta

SEQ ID NO: 340 - RNA, 21 nt, synthetic construct
  source 1..21: mol_type = other RNA
tcactgagaatactgtcccgt

SEQ ID NO: 341 - RNA, 21 nt, synthetic construct
  source 1..21: mol_type = other RNA
  modified_base 1: mod_base = OTHER; note = 2'-O-methylcytidine-3'-phosphorothioate
  modified_base 2: mod_base = OTHER; note = 2'-O-methyluridine-3'-phosphorothioate
  modified_base 3: mod_base = OTHER; note = 2'-O-methyluridine-3'-phosphate
  modified_base 4: mod_base = OTHER; note = 2'-O-methylcytidine-3'-phosphate
  modified_base 5: mod_base = OTHER; note = 2'-O-methyladenosine-3'-phosphate
  modified_base 6: mod_base = OTHER; note = 2'-O-methylguanosine-3'-phosphate
  modified_base 7: mod_base = OTHER; note = 2'-deoxy-2'-fluorouridine-3'-phosphate
  modified_base 8: mod_base = OTHER; note = 2'-O-methyluridine-3'-phosphate
  modified_base 9: mod_base = OTHER; note = 2'-deoxy-2'-fluorocytidine-3'-phosphate
  modified_base 10: mod_base = OTHER; note = 2'-deoxy-2'-fluorocytidine-3'-phosphate
  modified_base 11: mod_base = OTHER; note = 2'-deoxy-2'-fluorocytidine-3'-phosphate
  modified_base 12: mod_base = OTHER; note = 2'-O-methyluridine-3'-phosphate
  modified_base 13: mod_base = OTHER; note = 2'-O-methylguanosine-3'-phosphate
  modified_base 14: mod_base = OTHER; note = 2'-O-methyladenosine-3'-phosphate
  modified_base 15: mod_base = OTHER; note = 2'-O-methyladenosine-3'-phosphate
  modified_base 16: mod_base = OTHER; note = 2'-O-methyladenosine-3'-phosphate
  modified_base 17: mod_base = OTHER; note = 2'-O-methylguanosine-3'-phosphate
  modified_base 18: mod_base = OTHER; note = 2'-O-methyladenosine-3'-phosphate
  modified_base 19: mod_base = OTHER; note = 2'-O-methylcytidine-3'-phosphate
  modified_base 20: mod_base = OTHER; note = 2'-O-methyluridine-3'-phosphate
  modified_base 21: mod_base = OTHER; note = 2'-O-methyluridine-3'-phosphate ((2S,4R)-1-[29-[[2-(acetylamino)-2-deoxy-beta-D-galactopyra nosyl]oxy]-14,14-bis[[3-[[3-[[5-[[2-(acetylamino)-2-deoxy-b eta-D-galactopyranosyl]oxy]-1-oxopentyl]amino]propyl]amino] -3-oxopropoxy]methyl]-1,12,19,25-tetraoxo-16-oxa-13,20,24-t riazanonacos-1-yl]-4-hydroxy-2-pyrrolidinyl)methyl ester
cttcagttccctgaaagactt

SEQ ID NO: 342 - RNA, 23 nt, synthetic construct
  source 1..23: mol_type = other RNA
  modified_base 1: mod_base = OTHER; note = 2'-O-methyladenosine-3'-phosphorothioate
  modified_base 2: mod_base = OTHER; note = 2'-deoxy-2'-fluoroadenosine-3'-phosphorothioate
  modified_base 3: mod_base = OTHER; note = 2'-O-methylguanosine-3'-phosphate
  modified_base 4: mod_base = OTHER; note = 2'-O-methyluridine-3'-phosphate
  modified_base 5: mod_base = OTHER; note = 2'-O-methylcytidine-3'-phosphate
  modified_base 6: mod_base = OTHER; note = 2'-deoxy-2'-fluorouridine-3'-phosphate
  modified_base 7: mod_base = OTHER; note = 2'-O-methyluridine-3'-phosphate
  modified_base 8: mod_base = OTHER; note = 2'-deoxy-2'-fluorouridine-3'-phosphate
  modified_base 9: mod_base = OTHER; note = 2'-deoxy-2'-fluorocytidine-3'-phosphate
  modified_base 10: mod_base = OTHER; note = 2'-O-methyladenosine-3'-phosphate
  modified_base 11: mod_base = OTHER; note = 2'-O-methylguanosine-3'-phosphate
  modified_base 12: mod_base = OTHER; note = 2'-O-methylguanosine-3'-phosphate
  modified_base 13: mod_base = OTHER; note = 2'-O-methylguanosine-3'-phosphate
  modified_base 14: mod_base = OTHER; note = 2'-deoxy-2'-fluoroadenosine-3'-phosphate
  modified_base 15: mod_base = OTHER; note = 2'-O-methyladenosine-3'-phosphate
  modified_base 16: mod_base = OTHER; note = 2'-deoxy-2'-fluorocytidine-3'-phosphate
  modified_base 17: mod_base = OTHER; note = 2'-O-methyluridine-3'-phosphate
  modified_base 18: mod_base = OTHER; note = 2'-O-methylguanosine-3'-phosphate
  modified_base 19: mod_base = OTHER; note = 2'-O-methyladenosine-3'-phosphate
  modified_base 20: mod_base = OTHER; note = 2'-O-methyladenosine-3'-phosphate
  modified_base 21: mod_base = OTHER; note = 2'-O-methylguanosine-3'-phosphorothioate
  modified_base 22: mod_base = OTHER; note = 2'-O-methylcytidine-3'-phosphorothioate
  modified_base 23: mod_base = OTHER; note = 2'-O-methylcytidine
aagtctttcagggaactgaagcc

SEQ ID NO: 343 - RNA, 23 nt, synthetic construct
  source 1..23: mol_type = other RNA
ggcttcagttccctgaaagacta

SEQ ID NO: 344 - RNA, 21 nt, synthetic construct
  source 1..21: mol_type = other RNA
  modified_base 1: mod_base = OTHER; note = 2'-O-methyluridine-3'-phosphorothioate
  modified_base 2: mod_base = OTHER; note = 2'-O-methyluridine-3'-phosphorothioate
  modified_base 3: mod_base = OTHER; note = 2'-O-methylcytidine-3'-phosphate
  modified_base 4: mod_base = OTHER; note = 2'-O-methyladenosine-3'-phosphate
  modified_base 5: mod_base = OTHER; note = 2'-O-methylguanosine-3'-phosphate
  modified_base 6: mod_base = OTHER; note = 2'-O-methyluridine-3'-phosphate
  modified_base 7: mod_base = OTHER; note = 2'-deoxy-2'-fluorouridine-3'-phosphate
  modified_base 8: mod_base = OTHER; note = 2'-O-methylcytidine-3'-phosphate
  modified_base 9: mod_base = OTHER; note = 2'-deoxy-2'-fluorocytidine-3'-phosphate
  modified_base 10: mod_base = OTHER; note = 2'-deoxy-2'-fluorocytidine-3'-phosphate
  modified_base 11: mod_base = OTHER; note = 2'-deoxy-2'-fluorouridine-3'-phosphate
  modified_base 12: mod_base = OTHER; note = 2'-O-methylguanosine-3'-phosphate
  modified_base 13: mod_base = OTHER; note = 2'-O-methyladenosine-3'-phosphate
  modified_base 14: mod_base = OTHER; note = 2'-O-methyladenosine-3'-phosphate
  modified_base 15: mod_base = OTHER; note = 2'-O-methyladenosine-3'-phosphate
  modified_base 16: mod_base = OTHER; note = 2'-O-methylguanosine-3'-phosphate
  modified_base 17: mod_base = OTHER; note = 2'-O-methyladenosine-3'-phosphate
  modified_base 18: mod_base = OTHER; note = 2'-O-methylcytidine-3'-phosphate
  modified_base 19: mod_base = OTHER; note = 2'-O-methyluridine-3'-phosphate
  modified_base 20: mod_base = OTHER; note = 2'-O-methyladenosine-3'-phosphate
  modified_base 21: mod_base = OTHER; note = 2'-O-methyluridine-3'-phosphate ((2S,4R)-1-[29-[[2-(acetylamino)-2-deoxy-beta-D-galactopyra nosyl]oxy]-14,14-bis[[3-[[3-[[5-[[2-(acetylamino)-2-deoxy-b eta-D-galactopyranosyl]oxy]-1-oxopentyl]amino]propyl]amino] -3-oxopropoxy]methyl]-1,12,19,25-tetraoxo-16-oxa-13,20,24-t riazanonacos-1-yl]-4-hydroxy-2-pyrrolidinyl)methyl ester
ttcagttccctgaaagactat

SEQ ID NO: 345 - RNA, 23 nt, synthetic construct
  source 1..23: mol_type = other RNA
  modified_base 1: mod_base = OTHER; note = 2'-O-methyladenosine-3'-phosphorothioate
  modified_base 2: mod_base = OTHER; note = 2'-deoxy-2'-fluorouridine-3'-phosphorothioate
  modified_base 3: mod_base = OTHER; note = 2'-O-methyladenosine-3'-phosphate
  modified_base 4: mod_base = OTHER; note = 2'-O-methylguanosine-3'-phosphate
  modified_base 5: mod_base = OTHER; note = 2'-O-methyluridine-3'-phosphate
  modified_base 6: mod_base = OTHER; note = 2'-deoxy-2'-fluorocytidine-3'-phosphate
  modified_base 7: mod_base = OTHER; note = 2'-O-methyluridine-3'-phosphate
  modified_base 8: mod_base = OTHER; note = 2'-deoxy-2'-fluorouridine-3'-phosphate
  modified_base 9: mod_base = OTHER; note = 2'-deoxy-2'-fluorouridine-3'-phosphate
  modified_base 10: mod_base = OTHER; note = 2'-O-methylcytidine-3'-phosphate
  modified_base 11: mod_base = OTHER; note = 2'-O-methyladenosine-3'-phosphate
  modified_base 12: mod_base = OTHER; note = 2'-O-methylguanosine-3'-phosphate
  modified_base 13: mod_base = OTHER; note = 2'-O-methylguanosine-3'-phosphate
  modified_base 14: mod_base = OTHER; note = 2'-deoxy-2'-fluoroguanosine-3'-phosphate
  modified_base 15: mod_base = OTHER; note = 2'-O-methyladenosine-3'-phosphate
  modified_base 16: mod_base = OTHER; note = 2'-deoxy-2'-fluoroadenosine-3'-phosphate
  modified_base 17: mod_base = OTHER; note = 2'-O-methylcytidine-3'-phosphate
  modified_base 18: mod_base = OTHER; note = 2'-O-methyluridine-3'-phosphate
  modified_base 19: mod_base = OTHER; note = 2'-O-methylguanosine-3'-phosphate
  modified_base 20: mod_base = OTHER; note = 2'-O-methyladenosine-3'-phosphate
  modified_base 21: mod_base = OTHER; note = 2'-O-methyladenosine-3'-phosphorothioate
  modified_base 22: mod_base = OTHER; note = 2'-O-methylguanosine-3'-phosphorothioate
  modified_base 23: mod_base = OTHER; note = 2'-O-methylcytidine
atagtctttcagggaactgaagc

SEQ ID NO: 346 - RNA, 23 nt, synthetic construct
  source 1..23: mol_type = other RNA
gcttcagttccctgaaagactac

SEQ ID NO: 347 - RNA, 21 nt, synthetic construct
  source 1..21: mol_type = other RNA
  modified_base 1: mod_base = OTHER; note = 2'-O-methylcytidine-3'-phosphorothioate
  modified_base 2: mod_base = OTHER; note = 2'-O-methylcytidine-3'-phosphorothioate
  modified_base 3: mod_base = OTHER; note = 2'-O-methyladenosine-3'-phosphate
  modified_base 4: mod_base = OTHER; note = 2'-O-methyladenosine-3'-phosphate
  modified_base 5: mod_base = OTHER; note = 2'-O-methyluridine-3'-phosphate
  modified_base 6: mod_base = OTHER; note = 2'-O-methyladenosine-3'-phosphate
  modified_base 7: mod_base = OTHER; note = 2'-deoxy-2'-fluoroadenosine-3'-phosphate
  modified_base 8: mod_base = OTHER; note = 2'-O-methyladenosine-3'-phosphate
  modified_base 9: mod_base = OTHER; note = 2'-deoxy-2'-fluoroguanosine-3'-phosphate
  modified_base 10: mod_base = OTHER; note = 2'-deoxy-2'-fluorocytidine-3'-phosphate
  modified_base 11: mod_base = OTHER; note = 2'-deoxy-2'-fluorouridine-3'-phosphate
  modified_base 12: mod_base = OTHER; note = 2'-O-methylguanosine-3'-phosphate
  modified_base 13: mod_base = OTHER; note = 2'-O-methylguanosine-3'-phosphate
  modified_base 14: mod_base = OTHER; note = 2'-O-methyladenosine-3'-phosphate
  modified_base 15: mod_base = OTHER; note = 2'-O-methylcytidine-3'-phosphate
  modified_base 16: mod_base = OTHER; note = 2'-O-methyladenosine-3'-phosphate
  modified_base 17: mod_base = OTHER; note = 2'-O-methyladenosine-3'-phosphate
  modified_base 18: mod_base = OTHER; note = 2'-O-methylguanosine-3'-phosphate
  modified_base 19: mod_base = OTHER; note = 2'-O-methyladenosine-3'-phosphate
  modified_base 20: mod_base = OTHER; note = 2'-O-methyladenosine-3'-phosphate
  modified_base 21: mod_base = OTHER; note = 2'-O-methyluridine-3'-phosphate ((2S,4R)-1-[29-[[2-(acetylamino)-2-deoxy-beta-D-galactopyra nosyl]oxy]-14,14-bis[[3-[[3-[[5-[[2-(acetylamino)-2-deoxy-b eta-D-galactopyranosyl]oxy]-1-oxopentyl]amino]propyl]amino] -3-oxopropoxy]methyl]-1,12,19,25-tetraoxo-16-oxa-13,20,24-t riazanonacos-1-yl]-4-hydroxy-2-pyrrolidinyl)methyl ester
ccaataaagctggacaagaat

SEQ ID NO: 348 - RNA, 23 nt, synthetic construct
  source 1..23: mol_type = other RNA
  modified_base 1: mod_base = OTHER; note = 2'-O-methyladenosine-3'-phosphorothioate
  modified_base 2: mod_base = OTHER; note = 2'-deoxy-2'-fluorouridine-3'-phosphorothioate
  modified_base 3: mod_base = OTHER; note = 2'-O-methyluridine-3'-phosphate
  modified_base 4: mod_base = OTHER; note = 2'-O-methylcytidine-3'-phosphate
  modified_base 5: mod_base = OTHER; note = 2'-O-methyluridine-3'-phosphate
  modified_base 6: mod_base = OTHER; note = 2'-deoxy-2'-fluorouridine-3'-phosphate
  modified_base 7: mod_base = OTHER; note = 2'-O-methylguanosine-3'-phosphate
  modified_base 8: mod_base = OTHER; note = 2'-deoxy-2'-fluorouridine-3'-phosphate
  modified_base 9: mod_base = OTHER; note = 2'-deoxy-2'-fluorocytidine-3'-phosphate
  modified_base 10: mod_base = OTHER; note = 2'-O-methylcytidine-3'-phosphate
  modified_base 11: mod_base = OTHER; note = 2'-O-methyladenosine-3'-phosphate
  modified_base 12: mod_base = OTHER; note = 2'-O-methylguanosine-3'-phosphate
  modified_base 13: mod_base = OTHER; note = 2'-O-methylcytidine-3'-phosphate
  modified_base 14: mod_base = OTHER; note = 2'-deoxy-2'-fluorouridine-3'-phosphate
  modified_base 15: mod_base = OTHER; note = 2'-O-methyluridine-3'-phosphate
  modified_base 16: mod_base = OTHER; note = 2'-deoxy-2'-fluorouridine-3'-phosphate
  modified_base 17: mod_base = OTHER; note = 2'-O-methyladenosine-3'-phosphate
  modified_base 18: mod_base = OTHER; note = 2'-O-methyluridine-3'-phosphate
  modified_base 19: mod_base = OTHER; note = 2'-O-methyluridine-3'-phosphate
  modified_base 20: mod_base = OTHER; note = 2'-O-methylguanosine-3'-phosphate
  modified_base 21: mod_base = OTHER; note = 2'-O-methylguanosine-3'-phosphorothioate
  modified_base 22: mod_base = OTHER; note = 2'-O-methylguanosine-3'-phosphorothioate
  modified_base 23: mod_base = OTHER; note = 2'-O-methyladenosine
attcttgtccagctttattggga

SEQ ID NO: 349 - RNA, 23 nt, synthetic construct
  source 1..23: mol_type = other RNA
tcccaataaagctggacaagaag

SEQ ID NO: 350 - RNA, 21 nt, synthetic construct
  source 1..21: mol_type = other RNA
  modified_base 1: mod_base = OTHER; note = 2'-O-methyladenosine-3'-phosphorothioate
  modified_base 2: mod_base = OTHER; note = 2'-O-methyladenosine-3'-phosphorothioate
  modified_base 3: mod_base = OTHER; note = 2'-O-methyladenosine-3'-phosphate
  modified_base 4: mod_base = OTHER; note = 2'-O-methyladenosine-3'-phosphate
  modified_base 5: mod_base = OTHER; note = 2'-O-methylguanosine-3'-phosphate
  modified_base 6: mod_base = OTHER; note = 2'-O-methylguanosine-3'-phosphate
  modified_base 7: mod_base = OTHER; note = 2'-deoxy-2'-fluoroguanosine-3'-phosphate
  modified_base 8: mod_base = OTHER; note = 2'-O-methyladenosine-3'-phosphate
  modified_base 9: mod_base = OTHER; note = 2'-deoxy-2'-fluorocytidine-3'-phosphate
  modified_base 10: mod_base = OTHER; note = 2'-deoxy-2'-fluoroadenosine-3'-phosphate
  modified_base 11: mod_base = OTHER; note = 2'-deoxy-2'-fluoroguanosine-3'-phosphate
  modified_base 12: mod_base = OTHER; note = 2'-O-methyluridine-3'-phosphate
  modified_base 13: mod_base = OTHER; note = 2'-O-methyladenosine-3'-phosphate
  modified_base 14: mod_base = OTHER; note = 2'-O-methyluridine-3'-phosphate
  modified_base 15: mod_base = OTHER; note = 2'-O-methyluridine-3'-phosphate
  modified_base 16: mod_base = OTHER; note = 2'-O-methylcytidine-3'-phosphate
  modified_base 17: mod_base = OTHER; note = 2'-O-methyluridine-3'-phosphate
  modified_base 18: mod_base = OTHER; note = 2'-O-methylcytidine-3'-phosphate
  modified_base 19: mod_base = OTHER; note = 2'-O-methyladenosine-3'-phosphate
  modified_base 20: mod_base = OTHER; note = 2'-O-methylguanosine-3'-phosphate
  modified_base 21: mod_base = OTHER; note = 2'-O-methyluridine-3'-phosphate ((2S,4R)-1-[29-[[2-(acetylamino)-2-deoxy-beta-D-galactopyra nosyl]oxy]-14,14-bis[[3-[[3-[[5-[[2-(acetylamino)-2-deoxy-b eta-D-galactopyranosyl]oxy]-1-oxopentyl]amino]propyl]amino] -3-oxopropoxy]methyl]-1,12,19,25-tetraoxo-16-oxa-13,20,24-t riazanonacos-1-yl]-4-hydroxy-2-pyrrolidinyl)methyl ester
aaaagggacagtattctcagt

SEQ ID NO: 351 - RNA, 23 nt, synthetic construct
  source 1..23: mol_type = other RNA
  modified_base 1: mod_base = OTHER; note = 2'-O-methyladenosine-3'-phosphorothioate
  modified_base 2: mod_base = OTHER; note = 2'-deoxy-2'-fluorocytidine-3'-phosphorothioate
  modified_base 3: mod_base = OTHER; note = 2'-O-methyluridine-3'-phosphate
  modified_base 4: mod_base = OTHER; note = 2'-O-methylguanosine-3'-phosphate
  modified_base 5: mod_base = OTHER; note = 2'-O-methyladenosine-3'-phosphate
  modified_base 6: mod_base = OTHER; note = 2'-deoxy-2'-fluoroguanosine-3'-phosphate
  modified_base 7: mod_base = OTHER; note = 2'-O-methyladenosine-3'-phosphate
  modified_base 8: mod_base = OTHER; note = 2'-deoxy-2'-fluoroadenosine-3'-phosphate
  modified_base 9: mod_base = OTHER; note = 2'-deoxy-2'-fluorouridine-3'-phosphate
  modified_base 10: mod_base = OTHER; note = 2'-O-methyladenosine-3'-phosphate
  modified_base 11: mod_base = OTHER; note = 2'-O-methylcytidine-3'-phosphate
  modified_base 12: mod_base = OTHER; note = 2'-O-methyluridine-3'-phosphate
  modified_base 13: mod_base = OTHER; note = 2'-O-methylguanosine-3'-phosphate
  modified_base 14: mod_base = OTHER; note = 2'-deoxy-2'-fluorouridine-3'-phosphate
  modified_base 15: mod_base = OTHER; note = 2'-O-methylcytidine-3'-phosphate
  modified_base 16: mod_base = OTHER; note = 2'-deoxy-2'-fluorocytidine-3'-phosphate
  modified_base 17: mod_base = OTHER; note = 2'-O-methylcytidine-3'-phosphate
  modified_base 18: mod_base = OTHER; note = 2'-O-methyluridine-3'-phosphate
  modified_base 19: mod_base = OTHER; note = 2'-O-methyluridine-3'-phosphate
  modified_base 20: mod_base = OTHER; note = 2'-O-methyluridine-3'-phosphate
  modified_base 21: mod_base = OTHER; note = 2'-O-methyluridine-3'-phosphorothioate
  modified_base 22: mod_base = OTHER; note = 2'-O-methyladenosine-3'-phosphorothioate
  modified_base 23: mod_base = OTHER; note = 2'-O-methyladenosine
actgagaatactgtcccttttaa

SEQ ID NO: 352 - RNA, 23 nt, synthetic construct
  source 1..23: mol_type = other RNA
ttaaaagggacagtattctcagt

SEQ ID NO: 353 - RNA, 21 nt, synthetic construct
  source 1..21: mol_type = other RNA
  modified_base 1: mod_base = OTHER; note = 2'-O-methyladenosine-3'-phosphorothioate
  modified_base 2: mod_base = OTHER; note = 2'-O-methyluridine-3'-phosphorothioate
  modified_base 3: mod_base = OTHER; note = 2'-O-methylguanosine-3'-phosphate
  modified_base 4: mod_base = OTHER; note = 2'-O-methylguanosine-3'-phosphate
  modified_base 5: mod_base = OTHER; note = 2'-O-methylcytidine-3'-phosphate
  modified_base 6: mod_base = OTHER; note = 2'-O-methyluridine-3'-phosphate
  modified_base 7: mod_base = OTHER; note = 2'-deoxy-2'-fluorouridine-3'-phosphate
  modified_base 8: mod_base = OTHER; note = 2'-O-methylcytidine-3'-phosphate
  modified_base 9: mod_base = OTHER; note = 2'-deoxy-2'-fluoroadenosine-3'-phosphate
  modified_base 10: mod_base = OTHER; note = 2'-deoxy-2'-fluoroguanosine-3'-phosphate
  modified_base 11: mod_base = OTHER; note = 2'-deoxy-2'-fluorouridine-3'-phosphate
  modified_base 12: mod_base = OTHER; note = 2'-O-methyluridine-3'-phosphate
  modified_base 13: mod_base = OTHER; note = 2'-O-methylcytidine-3'-phosphate
  modified_base 14: mod_base = OTHER; note = 2'-O-methylcytidine-3'-phosphate
  modified_base 15: mod_base = OTHER; note = 2'-O-methylcytidine-3'-phosphate
  modified_base 16: mod_base = OTHER; note = 2'-O-methyluridine-3'-phosphate
  modified_base 17: mod_base = OTHER; note = 2'-O-methylguanosine-3'-phosphate
  modified_base 18: mod_base = OTHER; note = 2'-O-methyladenosine-3'-phosphate
  modified_base 19: mod_base = OTHER; note = 2'-O-methyladenosine-3'-phosphate
  modified_base 20: mod_base = OTHER; note = 2'-O-methyladenosine-3'-phosphate
  modified_base 21: mod_base = OTHER; note = 2'-O-methyluridine-3'-phosphate ((2S,4R)-1-[29-[[2-(acetylamino)-2-deoxy-beta-D-galactopyra nosyl]oxy]-14,14-bis[[3-[[3-[[5-[[2-(acetylamino)-2-deoxy-b eta-D-galactopyranosyl]oxy]-1-oxopentyl]amino]propyl]amino] -3-oxopropoxy]methyl]-1,12,19,25-tetraoxo-16-oxa-13,20,24-t riazanonacos-1-yl]-4-hydroxy-2-pyrrolidinyl)methyl ester
atggcttcagttccctgaaat

SEQ ID NO: 354 - RNA, 23 nt, synthetic construct
  source 1..23: mol_type = other RNA
  modified_base 1: mod_base = OTHER; note = 2'-O-methyladenosine-3'-phosphorothioate
  modified_base 2: mod_base = OTHER; note = 2'-deoxy-2'-fluorouridine-3'-phosphorothioate
  modified_base 3: mod_base = OTHER; note = 2'-O-methyluridine-3'-phosphate
  modified_base 4: mod_base = OTHER; note = 2'-O-methyluridine-3'-phosphate
  modified_base 5: mod_base = OTHER; note = 2'-O-methylcytidine-3'-phosphate
  modified_base 6: mod_base = OTHER; note = 2'-deoxy-2'-fluoroadenosine-3'-phosphate
  modified_base 7: mod_base = OTHER; note = 2'-O-methylguanosine-3'-phosphate
  modified_base 8: mod_base = OTHER; note = 2'-deoxy-2'-fluoroguanosine-3'-phosphate
  modified_base 9: mod_base = OTHER; note = 2'-deoxy-2'-fluoroguanosine-3'-phosphate
  modified_base 10: mod_base = OTHER; note = 2'-O-methyladenosine-3'-phosphate
  modified_base 11: mod_base = OTHER; note = 2'-O-methyladenosine-3'-phosphate
  modified_base 12: mod_base = OTHER; note = 2'-O-methylcytidine-3'-phosphate
  modified_base 13: mod_base = OTHER; note = 2'-O-methyluridine-3'-phosphate
  modified_base 14: mod_base = OTHER; note = 2'-deoxy-2'-fluoroguanosine-3'-phosphate
  modified_base 15: mod_base = OTHER; note = 2'-O-methyladenosine-3'-phosphate
  modified_base 16: mod_base = OTHER; note = 2'-deoxy-2'-fluoroadenosine-3'-phosphate
  modified_base 17: mod_base = OTHER; note = 2'-O-methylguanosine-3'-phosphate
  modified_base 18: mod_base = OTHER; note = 2'-O-methylcytidine-3'-phosphate
  modified_base 19: mod_base = OTHER; note = 2'-O-methylcytidine-3'-phosphate
  modified_base 20: mod_base = OTHER; note = 2'-O-methyladenosine-3'-phosphate
  modified_base 21: mod_base = OTHER; note = 2'-O-methyluridine-3'-phosphorothioate
  modified_base 22: mod_base = OTHER; note = 2'-O-methylcytidine-3'-phosphorothioate
  modified_base 23: mod_base = OTHER; note = 2'-O-methylguanosine
atttcagggaactgaagccatcg

SEQ ID NO: 355 - RNA, 23 nt, synthetic construct
  source 1..23: mol_type = other RNA
cgatggcttcagttccctgaaag

SEQ ID NO: 356 - RNA, 21 nt, synthetic construct
  source 1..21: mol_type = other RNA
  modified_base 1: mod_base = OTHER; note = 2'-O-methyladenosine-3'-phosphorothioate
  modified_base 2: mod_base = OTHER; note = 2'-O-methylguanosine-3'-phosphorothioate
  modified_base 3: mod_base = OTHER; note = 2'-O-methylcytidine-3'-phosphate
  modified_base 4: mod_base = OTHER; note = 2'-O-methyladenosine-3'-phosphate
  modified_base 5: mod_base = OTHER; note = 2'-O-methylcytidine-3'-phosphate
  modified_base 6: mod_base = OTHER; note = 2'-O-methylcytidine-3'-phosphate
  modified_base 7: mod_base = OTHER; note = 2'-deoxy-2'-fluoroguanosine-3'-phosphate
  modified_base 8: mod_base = OTHER; note = 2'-O-methyluridine-3'-phosphate
  modified_base 9: mod_base = OTHER; note = 2'-deoxy-2'-fluorouridine-3'-phosphate
  modified_base 10: mod_base = OTHER; note = 2'-deoxy-2'-fluoroadenosine-3'-phosphate
  modified_base 11: mod_base = OTHER; note = 2'-deoxy-2'-fluoroadenosine-3'-phosphate
  modified_base 12: mod_base = OTHER; note = 2'-O-methylguanosine-3'-phosphate
  modified_base 13: mod_base = OTHER; note = 2'-O-methylguanosine-3'-phosphate
  modified_base 14: mod_base = OTHER; note = 2'-O-methyladenosine-3'-phosphate
  modified_base 15: mod_base = OTHER; note = 2'-O-methylcytidine-3'-phosphate
  modified_base 16: mod_base = OTHER; note = 2'-O-methyladenosine-3'-phosphate
  modified_base 17: mod_base = OTHER; note = 2'-O-methyladenosine-3'-phosphate
  modified_base 18: mod_base = OTHER; note = 2'-O-methylguanosine-3'-phosphate
  modified_base 19: mod_base = OTHER; note = 2'-O-methyluridine-3'-phosphate
  modified_base 20: mod_base = OTHER; note = 2'-O-methyluridine-3'-phosphate
  modified_base 21: mod_base = OTHER; note = 2'-O-methyluridine-3'-phosphate ((2S,4R)-1-[29-[[2-(acetylamino)-2-deoxy-beta-D-galactopyra nosyl]oxy]-14,14-bis[[3-[[3-[[5-[[2-(acetylamino)-2-deoxy-b eta-D-galactopyranosyl]oxy]-1-oxopentyl]amino]propyl]amino] -3-oxopropoxy]methyl]-1,12,19,25-tetraoxo-16-oxa-13,20,24-t riazanonacos-1-yl]-4-hydroxy-2-pyrrolidinyl)methyl ester
agcaccgttaaggacaagttt

SEQ ID NO: 357 - RNA, 23 nt, synthetic construct
  source 1..23: mol_type = other RNA
  modified_base 1: mod_base = OTHER; note = 2'-O-methyladenosine-3'-phosphorothioate
  modified_base 2: mod_base = OTHER; note = 2'-deoxy-2'-fluoroadenosine-3'-phosphorothioate
  modified_base 3: mod_base = OTHER; note = 2'-O-methyladenosine-3'-phosphate
  modified_base 4: mod_base = OTHER; note = 2'-O-methylcytidine-3'-phosphate
  modified_base 5: mod_base = OTHER; note = 2'-O-methyluridine-3'-phosphate
  modified_base 6: mod_base = OTHER; note = 2'-deoxy-2'-fluorouridine-3'-phosphate
  modified_base 7: mod_base = OTHER; note = 2'-O-methylguanosine-3'-phosphate
  modified_base 8: mod_base = OTHER; note = 2'-deoxy-2'-fluorouridine-3'-phosphate
  modified_base 9: mod_base = OTHER; note = 2'-deoxy-2'-fluorocytidine-3'-phosphate
  modified_base 10: mod_base = OTHER; note = 2'-O-methylcytidine-3'-phosphate
  modified_base 11: mod_base = OTHER; note = 2'-O-methyluridine-3'-phosphate
  modified_base 12: mod_base = OTHER; note = 2'-O-methyluridine-3'-phosphate
  modified_base 13: mod_base = OTHER; note = 2'-O-methyladenosine-3'-phosphate
  modified_base 14: mod_base = OTHER; note = 2'-deoxy-2'-fluoroadenosine-3'-phosphate
  modified_base 15: mod_base = OTHER; note = 2'-O-methylcytidine-3'-phosphate
  modified_base 16: mod_base = OTHER; note = 2'-deoxy-2'-fluoroguanosine-3'-phosphate
  modified_base 17: mod_base = OTHER; note = 2'-O-methylguanosine-3'-phosphate
  modified_base 18: mod_base = OTHER; note = 2'-O-methyluridine-3'-phosphate
  modified_base 19: mod_base = OTHER; note = 2'-O-methylguanosine-3'-phosphate
  modified_base 20: mod_base = OTHER; note = 2'-O-methylcytidine-3'-phosphate
  modified_base 21: mod_base = OTHER; note = 2'-O-methyluridine-3'-phosphorothioate
  modified_base 22: mod_base = OTHER; note = 2'-O-methylcytidine-3'-phosphorothioate
  modified_base 23: mod_base = OTHER; note = 2'-O-methylcytidine
aaacttgtccttaacggtgctcc

SEQ ID NO: 358 - RNA, 23 nt, synthetic construct
  source 1..23: mol_type = other RNA
ggagcaccgttaaggacaagttc

SEQ ID NO: 359 - RNA, 21 nt, synthetic construct
  source 1..21: mol_type = other RNA
  modified_base 1: mod_base = OTHER; note = 2'-O-methyluridine-3'-phosphorothioate
  modified_base 2: mod_base = OTHER; note = 2'-O-methyladenosine-3'-phosphorothioate
  modified_base 3: mod_base = OTHER; note = 2'-O-methyladenosine-3'-phosphate
  modified_base 4: mod_base = OTHER; note = 2'-O-methyladenosine-3'-phosphate
  modified_base 5: mod_base = OTHER; note = 2'-O-methyladenosine-3'-phosphate
  modified_base 6: mod_base = OTHER; note = 2'-O-methylguanosine-3'-phosphate
  modified_base 7: mod_base = OTHER; note = 2'-deoxy-2'-fluoroguanosine-3'-phosphate
  modified_base 8: mod_base = OTHER; note = 2'-O-methylguanosine-3'-phosphate
  modified_base 9: mod_base = OTHER; note = 2'-deoxy-2'-fluoroadenosine-3'-phosphate
  modified_base 10: mod_base = OTHER; note = 2'-deoxy-2'-fluorocytidine-3'-phosphate
  modified_base 11: mod_base = OTHER; note = 2'-deoxy-2'-fluoroadenosine-3'-phosphate
  modified_base 12: mod_base = OTHER; note = 2'-O-methylguanosine-3'-phosphate
  modified_base 13: mod_base = OTHER; note = 2'-O-methyluridine-3'-phosphate
  modified_base 14: mod_base = OTHER; note = 2'-O-methyladenosine-3'-phosphate
  modified_base 15: mod_base = OTHER; note = 2'-O-methyluridine-3'-phosphate
  modified_base 16: mod_base = OTHER; note = 2'-O-methyluridine-3'-phosphate
  modified_base 17: mod_base = OTHER; note = 2'-O-methylcytidine-3'-phosphate
  modified_base 18: mod_base = OTHER; note = 2'-O-methyluridine-3'-phosphate
  modified_base 19: mod_base = OTHER; note = 2'-O-methylcytidine-3'-phosphate
  modified_base 20: mod_base = OTHER; note = 2'-O-methyladenosine-3'-phosphate
  modified_base 21: mod_base = OTHER; note = 2'-O-methyluridine-3'-phosphate ((2S,4R)-1-[29-[[2-(acetylamino)-2-deoxy-beta-D-galactopyra nosyl]oxy]-14,14-bis[[3-[[3-[[5-[[2-(acetylamino)-2-deoxy-b eta-D-galactopyranosyl]oxy]-1-oxopentyl]amino]propyl]amino] -3-oxopropoxy]methyl]-1,12,19,25-tetraoxo-16-oxa-13,20,24-t riazanonacos-1-yl]-4-hydroxy-2-pyrrolidinyl)methyl ester
taaaagggacagtattctcat

SEQ ID NO: 360 - RNA, 23 nt, synthetic construct
  source 1..23: mol_type = other RNA
  modified_base 1: mod_base = OTHER; note = 2'-O-methyladenosine-3'-phosphorothioate
  modified_base 2: mod_base = OTHER; note = 2'-deoxy-2'-fluorouridine-3'-phosphorothioate
  modified_base 3: mod_base = OTHER; note = 2'-O-methylguanosine-3'-phosphate
  modified_base 4: mod_base = OTHER; note = 2'-O-methyladenosine-3'-phosphate
  modified_base 5: mod_base = OTHER; note = 2'-O-methylguanosine-3'-phosphate
  modified_base 6: mod_base = OTHER; note = 2'-deoxy-2'-fluoroadenosine-3'-phosphate
  modified_base 7: mod_base = OTHER; note = 2'-O-methyladenosine-3'-phosphate
  modified_base 8: mod_base = OTHER; note = 2'-deoxy-2'-fluorouridine-3'-phosphate
  modified_base 9: mod_base = OTHER; note = 2'-deoxy-2'-fluoroadenosine-3'-phosphate
  modified_base 10: mod_base = OTHER; note = 2'-O-methylcytidine-3'-phosphate
  modified_base 11: mod_base = OTHER; note = 2'-O-methyluridine-3'-phosphate
  modified_base 12: mod_base = OTHER; note = 2'-O-methylguanosine-3'-phosphate
  modified_base 13: mod_base = OTHER; note = 2'-O-methyluridine-3'-phosphate
  modified_base 14: mod_base = OTHER; note = 2'-deoxy-2'-fluorocytidine-3'-phosphate
  modified_base 15: mod_base = OTHER; note = 2'-O-methylcytidine-3'-phosphate
  modified_base 16: mod_base = OTHER; note = 2'-deoxy-2'-fluorocytidine-3'-phosphate
  modified_base 17: mod_base = OTHER; note = 2'-O-methyluridine-3'-phosphate
  modified_base 18: mod_base = OTHER; note = 2'-O-methyluridine-3'-phosphate
  modified_base 19: mod_base = OTHER; note = 2'-O-methyluridine-3'-phosphate
  modified_base 20: mod_base = OTHER; note = 2'-O-methyluridine-3'-phosphate
  modified_base 21: mod_base = OTHER; note = 2'-O-methyladenosine-3'-phosphorothioate
  modified_base 22: mod_base = OTHER; note = 2'-O-methyladenosine-3'-phosphorothioate
  modified_base 23: mod_base = OTHER; note = 2'-O-methylguanosine
atgagaatactgtcccttttaag

SEQ ID NO: 361 - RNA, 23 nt, synthetic construct
  source 1..23: mol_type = other RNA
cttaaaagggacagtattctcag

SEQ ID NO: 362 - RNA, 21 nt, synthetic construct
  source 1..21: mol_type = other RNA
  modified_base 1: mod_base = OTHER; note = 2'-O-methyladenosine-3'-phosphorothioate
  modified_base 2: mod_base = OTHER; note = 2'-O-methylcytidine-3'-phosphorothioate
  modified_base 3: mod_base = OTHER; note = 2'-O-methylcytidine-3'-phosphate
  modified_base 4: mod_base = OTHER; note = 2'-O-methylguanosine-3'-phosphate
  modified_base 5: mod_base = OTHER; note = 2'-O-methyladenosine-3'-phosphate
  modified_base 6: mod_base = OTHER; note = 2'-O-methyluridine-3'-phosphate
  modified_base 7: mod_base = OTHER; note = 2'-deoxy-2'-fluoroguanosine-3'-phosphate
  modified_base 8: mod_base = OTHER; note = 2'-O-methylguanosine-3'-phosphate
  modified_base 9: mod_base = OTHER; note = 2'-deoxy-2'-fluorocytidine-3'-phosphate
  modified_base 10: mod_base = OTHER; note = 2'-deoxy-2'-fluorouridine-3'-phosphate
  modified_base 11: mod_base = OTHER; note = 2'-deoxy-2'-fluorouridine-3'-phosphate
  modified_base 12: mod_base = OTHER; note = 2'-O-methylcytidine-3'-phosphate
  modified_base 13: mod_base = OTHER; note = 2'-O-methyladenosine-3'-phosphate
  modified_base 14: mod_base = OTHER; note = 2'-O-methylguanosine-3'-phosphate
  modified_base 15: mod_base = OTHER; note = 2'-O-methyluridine-3'-phosphate
  modified_base 16: mod_base = OTHER; note = 2'-O-methyluridine-3'-phosphate
  modified_base 17: mod_base = OTHER; note = 2'-O-methylcytidine-3'-phosphate
  modified_base 18: mod_base = OTHER; note = 2'-O-methylcytidine-3'-phosphate
  modified_base 19: mod_base = OTHER; note = 2'-O-methylcytidine-3'-phosphate
  modified_base 20: mod_base = OTHER; note = 2'-O-methyluridine-3'-phosphate
  modified_base 21: mod_base = OTHER; note = 2'-O-methyluridine-3'-phosphate ((2S,4R)-1-[29-[[2-(acetylamino)-2-deoxy-beta-D-galactopyra nosyl]oxy]-14,14-bis[[3-[[3-[[5-[[2-(acetylamino)-2-deoxy-b eta-D-galactopyranosyl]oxy]-1-oxopentyl]amino]propyl]amino] -3-oxopropoxy]methyl]-1,12,19,25-tetraoxo-16-oxa-13,20,24-t riazanonacos-1-yl]-4-hydroxy-2-pyrrolidinyl)methyl ester
accgatggcttcagttccctt

SEQ ID NO: 363 - RNA, 23 nt, synthetic construct
  source 1..23: mol_type = other RNA
  modified_base 1: mod_base = OTHER; note = 2'-O-methyladenosine-3'-phosphorothioate
  modified_base 2: mod_base = OTHER; note = 2'-deoxy-2'-fluoroadenosine-3'-phosphorothioate
  modified_base 3: mod_base = OTHER; note = 2'-O-methylguanosine-3'-phosphate
  modified_base 4: mod_base = OTHER; note = 2'-O-methylguanosine-3'-phosphate
  modified_base 5: mod_base = OTHER; note = 2'-O-methylguanosine-3'-phosphate
  modified_base 6: mod_base = OTHER; note = 2'-deoxy-2'-fluoroadenosine-3'-phosphate
  modified_base 7: mod_base = OTHER; note = 2'-O-methyladenosine-3'-phosphate
  modified_base 8: mod_base = OTHER; note = 2'-deoxy-2'-fluorocytidine-3'-phosphate
  modified_base 9: mod_base = OTHER; note = 2'-deoxy-2'-fluorouridine-3'-phosphate
  modified_base 10: mod_base = OTHER; note = 2'-O-methylguanosine-3'-phosphate
  modified_base 11: mod_base = OTHER; note = 2'-O-methyladenosine-3'-phosphate
  modified_base 12: mod_base = OTHER; note = 2'-O-methyladenosine-3'-phosphate
  modified_base 13: mod_base = OTHER; note = 2'-O-methylguanosine-3'-phosphate
  modified_base 14: mod_base = OTHER; note = 2'-deoxy-2'-fluorocytidine-3'-phosphate
  modified_base 15: mod_base = OTHER; note = 2'-O-methylcytidine-3'-phosphate
  modified_base 16: mod_base = OTHER; note = 2'-deoxy-2'-fluoroadenosine-3'-phosphate
  modified_base 17: mod_base = OTHER; note = 2'-O-methyluridine-3'-phosphate
  modified_base 18: mod_base = OTHER; note = 2'-O-methylcytidine-3'-phosphate
  modified_base 19: mod_base = OTHER; note = 2'-O-methylguanosine-3'-phosphate
  modified_base 20: mod_base = OTHER; note = 2'-O-methylguanosine-3'-phosphate
  modified_base 21: mod_base = OTHER; note = 2'-O-methyluridine-3'-phosphorothioate
  modified_base 22: mod_base = OTHER; note = 2'-O-methylcytidine-3'-phosphorothioate
  modified_base 23: mod_base = OTHER; note = 2'-O-methyladenosine
aagggaactgaagccatcggtca

SEQ ID NO: 364 - RNA, 23 nt, synthetic construct
  source 1..23: mol_type = other RNA
tgaccgatggcttcagttccctg

SEQ ID NO: 365 - RNA, 21 nt, synthetic construct
  source 1..21: mol_type = other RNA
  modified_base 1: mod_base = OTHER; note = 2'-O-methyluridine-3'-phosphorothioate
  modified_base 2: mod_base = OTHER; note = 2'-O-methyluridine-3'-phosphorothioate
  modified_base 3: mod_base = OTHER; note = 2'-O-methyladenosine-3'-phosphate
  modified_base 4: mod_base = OTHER; note = 2'-O-methyladenosine-3'-phosphate
  modified_base 5: mod_base = OTHER; note = 2'-O-methyladenosine-3'-phosphate
  modified_base 6: mod_base = OTHER; note = 2'-O-methyladenosine-3'-phosphate
  modified_base 7: mod_base = OTHER; note = 2'-deoxy-2'-fluoroguanosine-3'-phosphate
  modified_base 8: mod_base = OTHER; note = 2'-O-methylguanosine-3'-phosphate
  modified_base 9: mod_base = OTHER; note = 2'-deoxy-2'-fluoroguanosine-3'-phosphate
  modified_base 10: mod_base = OTHER; note = 2'-deoxy-2'-fluoroadenosine-3'-phosphate
  modified_base 11: mod_base = OTHER; note = 2'-deoxy-2'-fluorocytidine-3'-phosphate
  modified_base 12: mod_base = OTHER; note = 2'-O-methyladenosine-3'-phosphate
  modified_base 13: mod_base = OTHER; note = 2'-O-methylguanosine-3'-phosphate
  modified_base 14: mod_base = OTHER; note = 2'-O-methyluridine-3'-phosphate
  modified_base 15: mod_base = OTHER; note = 2'-O-methyladenosine-3'-phosphate
  modified_base 16: mod_base = OTHER; note = 2'-O-methyluridine-3'-phosphate
  modified_base 17: mod_base = OTHER; note = 2'-O-methyluridine-3'-phosphate
  modified_base 18: mod_base = OTHER; note = 2'-O-methylcytidine-3'-phosphate
  modified_base 19: mod_base = OTHER; note = 2'-O-methyluridine-3'-phosphate
  modified_base 20: mod_base = OTHER; note = 2'-O-methylcytidine-3'-phosphate
  modified_base 21: mod_base = OTHER; note = 2'-O-methyluridine-3'-phosphate ((2S,4R)-1-[29-[[2-(acetylamino)-2-deoxy-beta-D-galactopyra nosyl]oxy]-14,14-bis[[3-[[3-[[5-[[2-(acetylamino)-2-deoxy-b eta-D-galactopyranosyl]oxy]-1-oxopentyl]amino]propyl]amino] -3-oxopropoxy]methyl]-1,12,19,25-tetraoxo-16-oxa-13,20,24-t riazanonacos-1-yl]-4-hydroxy-2-pyrrolidinyl)methyl ester
ttaaaagggacagtattctct

SEQ ID NO: 366 - RNA, 23 nt, synthetic construct
  source 1..23: mol_type = other RNA
  modified_base 1: mod_base = OTHER; note = 2'-O-methyladenosine-3'-phosphorothioate
  modified_base 2: mod_base = OTHER; note = 2'-deoxy-2'-fluoroguanosine-3'-phosphorothioate
  modified_base 3: mod_base = OTHER; note = 2'-O-methyladenosine-3'-phosphate
  modified_base 4: mod_base = OTHER; note = 2'-O-methylguanosine-3'-phosphate
  modified_base 5: mod_base = OTHER; note = 2'-O-methyladenosine-3'-phosphate
  modified_base 6: mod_base = OTHER; note = 2'-deoxy-2'-fluoroadenosine-3'-phosphate
  modified_base 7: mod_base = OTHER; note = 2'-O-methyluridine-3'-phosphate
  modified_base 8: mod_base = OTHER; note = 2'-deoxy-2'-fluoroadenosine-3'-phosphate
  modified_base 9: mod_base = OTHER; note = 2'-deoxy-2'-fluorocytidine-3'-phosphate
  modified_base 10: mod_base = OTHER; note = 2'-O-methyluridine-3'-phosphate
  modified_base 11: mod_base = OTHER; note = 2'-O-methylguanosine-3'-phosphate
  modified_base 12: mod_base = OTHER; note = 2'-O-methyluridine-3'-phosphate
  modified_base 13: mod_base = OTHER; note = 2'-O-methylcytidine-3'-phosphate
  modified_base 14: mod_base = OTHER; note = 2'-deoxy-2'-fluorocytidine-3'-phosphate
  modified_base 15: mod_base = OTHER; note = 2'-O-methylcytidine-3'-phosphate
  modified_base 16: mod_base = OTHER; note = 2'-deoxy-2'-fluorouridine-3'-phosphate
  modified_base 17: mod_base = OTHER; note = 2'-O-methyluridine-3'-phosphate
  modified_base 18: mod_base = OTHER; note = 2'-O-methyluridine-3'-phosphate
  modified_base 19: mod_base = OTHER; note = 2'-O-methyluridine-3'-phosphate
  modified_base 20: mod_base = OTHER; note = 2'-O-methyladenosine-3'-phosphate
  modified_base 21: mod_base = OTHER; note = 2'-O-methyladenosine-3'-phosphorothioate
  modified_base 22: mod_base = OTHER; note = 2'-O-methylguanosine-3'-phosphorothioate
  modified_base 23: mod_base = OTHER; note = 2'-O-methylcytidine
agagaatactgtcccttttaagc

SEQ ID NO: 367 - RNA, 23 nt, synthetic construct
  source 1..23: mol_type = other RNA
gcttaaaagggacagtattctca

SEQ ID NO: 368 - RNA, 21 nt, synthetic construct
  source 1..21: mol_type = other RNA
  modified_base 1: mod_base = OTHER; note = 2'-O-methylguanosine-3'-phosphorothioate
  modified_base 2: mod_base = OTHER; note = 2'-O-methylcytidine-3'-phosphorothioate
  modified_base 3: mod_base = OTHER; note = 2'-O-methyluridine-3'-phosphate
  modified_base 4: mod_base = OTHER; note = 2'-O-methyluridine-3'-phosphate
  modified_base 5: mod_base = OTHER; note = 2'-O-methylcytidine-3'-phosphate
  modified_base 6: mod_base = OTHER; note = 2'-O-methyladenosine-3'-phosphate
  modified_base 7: mod_base = OTHER; note = 2'-deoxy-2'-fluoroguanosine-3'-phosphate
  modified_base 8: mod_base = OTHER; note = 2'-O-methyluridine-3'-phosphate
  modified_base 9: mod_base = OTHER; note = 2'-deoxy-2'-fluorouridine-3'-phosphate
  modified_base 10: mod_base = OTHER; note = 2'-deoxy-2'-fluorocytidine-3'-phosphate
  modified_base 11: mod_base = OTHER; note = 2'-deoxy-2'-fluorocytidine-3'-phosphate
  modified_base 12: mod_base = OTHER; note = 2'-O-methylcytidine-3'-phosphate
  modified_base 13: mod_base = OTHER; note = 2'-O-methyluridine-3'-phosphate
  modified_base 14: mod_base = OTHER; note = 2'-O-methylguanosine-3'-phosphate
  modified_base 15: mod_base = OTHER; note = 2'-O-methyladenosine-3'-phosphate
  modified_base 16: mod_base = OTHER; note = 2'-O-methyladenosine-3'-phosphate
  modified_base 17: mod_base = OTHER; note = 2'-O-methyladenosine-3'-phosphate
  modified_base 18: mod_base = OTHER; note = 2'-O-methylguanosine-3'-phosphate
  modified_base 19: mod_base = OTHER; note = 2'-O-methyladenosine-3'-phosphate
  modified_base 20: mod_base = OTHER; note = 2'-O-methylcytidine-3'-phosphate
  modified_base 21: mod_base = OTHER; note = 2'-O-methyluridine-3'-phosphate ((2S,4R)-1-[29-[[2-(acetylamino)-2-deoxy-beta-D-galactopyra nosyl]oxy]-14,14-bis[[3-[[3-[[5-[[2-(acetylamino)-2-deoxy-b eta-D-galactopyranosyl]oxy]-1-oxopentyl]amino]propyl]amino] -3-oxopropoxy]methyl]-1,12,19,25-tetraoxo-16-oxa-13,20,24-t riazanonacos-1-yl]-4-hydroxy-2-pyrrolidinyl)methyl ester
gcttcagttccctgaaagact

SEQ ID NO: 369 - RNA, 23 nt, synthetic construct
  source 1..23: mol_type = other RNA
  modified_base 1: mod_base = OTHER; note = 2'-O-methyladenosine-3'-phosphorothioate
  modified_base 2: mod_base = OTHER; note = 2'-deoxy-2'-fluoroguanosine-3'-phosphorothioate
  modified_base 3: mod_base = OTHER; note = 2'-O-methyluridine-3'-phosphate
  modified_base 4: mod_base = OTHER; note = 2'-O-methylcytidine-3'-phosphate
  modified_base 5: mod_base = OTHER; note = 2'-O-methyluridine-3'-phosphate
  modified_base 6: mod_base = OTHER; note = 2'-deoxy-2'-fluorouridine-3'-phosphate
  modified_base 7: mod_base = OTHER; note = 2'-O-methyluridine-3'-phosphate
  modified_base 8: mod_base = OTHER; note = 2'-deoxy-2'-fluorocytidine-3'-phosphate
  modified_base 9: mod_base = OTHER; note = 2'-deoxy-2'-fluoroadenosine-3'-phosphate
  modified_base 10: mod_base = OTHER; note = 2'-O-methylguanosine-3'-phosphate
  modified_base 11: mod_base = OTHER; note = 2'-O-methylguanosine-3'-phosphate
  modified_base 12: mod_base = OTHER; note = 2'-O-methylguanosine-3'-phosphate
  modified_base 13: mod_base = OTHER; note = 2'-O-methyladenosine-3'-phosphate
  modified_base 14: mod_base = OTHER; note = 2'-deoxy-2'-fluoroadenosine-3'-phosphate
  modified_base 15: mod_base = OTHER; note = 2'-O-methylcytidine-3'-phosphate
  modified_base 16: mod_base = OTHER; note = 2'-deoxy-2'-fluorouridine-3'-phosphate
  modified_base 17: mod_base = OTHER; note = 2'-O-methylguanosine-3'-phosphate
  modified_base 18: mod_base = OTHER; note = 2'-O-methyladenosine-3'-phosphate
  modified_base 19: mod_base = OTHER; note = 2'-O-methyladenosine-3'-phosphate
  modified_base 20: mod_base = OTHER; note = 2'-O-methylguanosine-3'-phosphate
  modified_base 21: mod_base = OTHER; note = 2'-O-methylcytidine-3'-phosphorothioate
  modified_base 22: mod_base = OTHER; note = 2'-O-methylcytidine-3'-phosphorothioate
  modified_base 23: mod_base = OTHER; note = 2'-O-methyladenosine
agtctttcagggaactgaagcca

SEQ ID NO: 370 - RNA, 23 nt, synthetic construct
  source 1..23: mol_type = other RNA
tggcttcagttccctgaaagact

SEQ ID NO: 371 - RNA, 21 nt, synthetic construct
  source 1..21: mol_type = other RNA
  modified_base 1: mod_base = OTHER; note = 2'-O-methylguanosine-3'-phosphorothioate
  modified_base 2: mod_base = OTHER; note = 2'-O-methyladenosine-3'-phosphorothioate
  modified_base 3: mod_base = OTHER; note = 2'-O-methyluridine-3'-phosphate
  modified_base 4: mod_base = OTHER; note = 2'-O-methylguanosine-3'-phosphate
  modified_base 5: mod_base = OTHER; note = 2'-O-methylguanosine-3'-phosphate
  modified_base 6: mod_base = OTHER; note = 2'-O-methylcytidine-3'-phosphate
  modified_base 7: mod_base = OTHER; note = 2'-deoxy-2'-fluorouridine-3'-phosphate
  modified_base 8: mod_base = OTHER; note = 2'-O-methyluridine-3'-phosphate
  modified_base 9: mod_base = OTHER; note = 2'-deoxy-2'-fluorocytidine-3'-phosphate
  modified_base 10: mod_base = OTHER; note = 2'-deoxy-2'-fluoroadenosine-3'-phosphate
  modified_base 11: mod_base = OTHER; note = 2'-deoxy-2'-fluoroguanosine-3'-phosphate
  modified_base 12: mod_base = OTHER; note = 2'-O-methyluridine-3'-phosphate
  modified_base 13: mod_base = OTHER; note = 2'-O-methyluridine-3'-phosphate
  modified_base 14: mod_base = OTHER; note = 2'-O-methylcytidine-3'-phosphate
  modified_base 15: mod_base = OTHER; note = 2'-O-methylcytidine-3'-phosphate
  modified_base 16: mod_base = OTHER; note = 2'-O-methylcytidine-3'-phosphate
  modified_base 17: mod_base = OTHER; note = 2'-O-methyluridine-3'-phosphate
  modified_base 18: mod_base = OTHER; note = 2'-O-methylguanosine-3'-phosphate
  modified_base 19: mod_base = OTHER; note = 2'-O-methyladenosine-3'-phosphate
  modified_base 20: mod_base = OTHER; note = 2'-O-methyladenosine-3'-phosphate
  modified_base 21: mod_base = OTHER; note = 2'-O-methyluridine-3'-phosphate ((2S,4R)-1-[29-[[2-(acetylamino)-2-deoxy-beta-D-galactopyra nosyl]oxy]-14,14-bis[[3-[[3-[[5-[[2-(acetylamino)-2-deoxy-b eta-D-galactopyranosyl]oxy]-1-oxopentyl]amino]propyl]amino] -3-oxopropoxy]methyl]-1,12,19,25-tetraoxo-16-oxa-13,20,24-t riazanonacos-1-yl]-4-hydroxy-2-pyrrolidinyl)methyl ester
gatggcttcagttccctgaat

SEQ ID NO: 372 - RNA, 23 nt, synthetic construct
  source 1..23: mol_type = other RNA
  modified_base 1: mod_base = OTHER; note = 2'-O-methyladenosine-3'-phosphorothioate
  modified_base 2: mod_base = OTHER; note = 2'-deoxy-2'-fluorouridine-3'-phosphorothioate
  modified_base 3: mod_base = OTHER; note = 2'-O-methyluridine-3'-phosphate
  modified_base 4: mod_base = OTHER; note = 2'-O-methylcytidine-3'-phosphate
  modified_base 5: mod_base = OTHER; note = 2'-O-methyladenosine-3'-phosphate
  modified_base 6: mod_base = OTHER; note = 2'-deoxy-2'-fluoroguanosine-3'-phosphate
  modified_base 7: mod_base = OTHER; note = 2'-O-methylguanosine-3'-phosphate
  modified_base 8: mod_base = OTHER; note = 2'-deoxy-2'-fluoroguanosine-3'-phosphate
  modified_base 9: mod_base = OTHER; note = 2'-deoxy-2'-fluoroadenosine-3'-phosphate
  modified_base 10: mod_base = OTHER; note = 2'-O-methyladenosine-3'-phosphate
  modified_base 11: mod_base = OTHER; note = 2'-O-methylcytidine-3'-phosphate
  modified_base 12: mod_base = OTHER; note = 2'-O-methyluridine-3'-phosphate
  modified_base 13: mod_base = OTHER; note = 2'-O-methylguanosine-3'-phosphate
  modified_base 14: mod_base = OTHER; note = 2'-deoxy-2'-fluoroadenosine-3'-phosphate
  modified_base 15: mod_base = OTHER; note = 2'-O-methyladenosine-3'-phosphate
  modified_base 16: mod_base = OTHER; note = 2'-deoxy-2'-fluoroguanosine-3'-phosphate
  modified_base 17: mod_base = OTHER; note = 2'-O-methylcytidine-3'-phosphate
  modified_base 18: mod_base = OTHER; note = 2'-O-methylcytidine-3'-phosphate
  modified_base 19: mod_base = OTHER; note = 2'-O-methyladenosine-3'-phosphate
  modified_base 20: mod_base = OTHER; note = 2'-O-methyluridine-3'-phosphate
  modified_base 21: mod_base = OTHER; note = 2'-O-methylcytidine-3'-phosphorothioate
  modified_base 22: mod_base = OTHER; note = 2'-O-methylguanosine-3'-phosphorothioate
  modified_base 23: mod_base = OTHER; note = 2'-O-methylguanosine
attcagggaactgaagccatcgg

SEQ ID NO: 373 - RNA, 23 nt, synthetic construct
  source 1..23: mol_type = other RNA
ccgatggcttcagttccctgaaa

SEQ ID NO: 374 - RNA, 21 nt, synthetic construct
  source 1..21: mol_type = other RNA
  modified_base 1: mod_base = OTHER; note = 2'-O-methyladenosine-3'-phosphorothioate
  modified_base 2: mod_base = OTHER; note = 2'-O-methyladenosine-3'-phosphorothioate
  modified_base 3: mod_base = OTHER; note = 2'-O-methylguanosine-3'-phosphate
  modified_base 4: mod_base = OTHER; note = 2'-O-methylguanosine-3'-phosphate
  modified_base 5: mod_base = OTHER; note = 2'-O-methylguanosine-3'-phosphate
  modified_base 6: mod_base = OTHER; note = 2'-O-methyladenosine-3'-phosphate
  modified_base 7: mod_base = OTHER; note = 2'-deoxy-2'-fluorocytidine-3'-phosphate
  modified_base 8: mod_base = OTHER; note = 2'-O-methyladenosine-3'-phosphate
  modified_base 9: mod_base = OTHER; note = 2'-deoxy-2'-fluoroguanosine-3'-phosphate
  modified_base 10: mod_base = OTHER; note = 2'-deoxy-2'-fluorouridine-3'-phosphate
  modified_base 11: mod_base = OTHER; note = 2'-deoxy-2'-fluoroadenosine-3'-phosphate
  modified_base 12: mod_base = OTHER; note = 2'-O-methyluridine-3'-phosphate
  modified_base 13: mod_base = OTHER; note = 2'-O-methyluridine-3'-phosphate
  modified_base 14: mod_base = OTHER; note = 2'-O-methylcytidine-3'-phosphate
  modified_base 15: mod_base = OTHER; note = 2'-O-methyluridine-3'-phosphate
  modified_base 16: mod_base = OTHER; note = 2'-O-methylcytidine-3'-phosphate
  modified_base 17: mod_base = OTHER; note = 2'-O-methyladenosine-3'-phosphate
  modified_base 18: mod_base = OTHER; note = 2'-O-methylguanosine-3'-phosphate
  modified_base 19: mod_base = OTHER; note = 2'-O-methyluridine-3'-phosphate
  modified_base 20: mod_base = OTHER; note = 2'-O-methylguanosine-3'-phosphate
  modified_base 21: mod_base = OTHER; note = 2'-O-methyluridine-3'-phosphate ((2S,4R)-1-[29-[[2-(acetylamino)-2-deoxy-beta-D-galactopyra nosyl]oxy]-14,14-bis[[3-[[3-[[5-[[2-(acetylamino)-2-deoxy-b eta-D-galactopyranosyl]oxy]-1-oxopentyl]amino]propyl]amino] -3-oxopropoxy]methyl]-1,12,19,25-tetraoxo-16-oxa-13,20,24-t riazanonacos-1-yl]-4-hydroxy-2-pyrrolidinyl)methyl ester
aagggacagtattctcagtgt

SEQ ID NO: 375 - RNA, 23 nt, synthetic construct
  source 1..23: mol_type = other RNA
  modified_base 1: mod_base = OTHER; note = 2'-O-methyladenosine-3'-phosphorothioate
  modified_base 2: mod_base = OTHER; note = 2'-deoxy-2'-fluorocytidine-3'-phosphorothioate
  modified_base 3: mod_base = OTHER; note = 2'-O-methyladenosine-3'-phosphate
  modified_base 4: mod_base = OTHER; note = 2'-O-methylcytidine-3'-phosphate
  modified_base 5: mod_base = OTHER; note = 2'-O-methyluridine-3'-phosphate
  modified_base 6: mod_base = OTHER; note = 2'-deoxy-2'-fluoroguanosine-3'-phosphate
  modified_base 7: mod_base = OTHER; note = 2'-O-methyladenosine-3'-phosphate
  modified_base 8: mod_base = OTHER; note = 2'-deoxy-2'-fluoroguanosine-3'-phosphate
  modified_base 9: mod_base = OTHER; note = 2'-deoxy-2'-fluoroadenosine-3'-phosphate
  modified_base 10: mod_base = OTHER; note = 2'-O-methyladenosine-3'-phosphate
  modified_base 11: mod_base = OTHER; note = 2'-O-methyluridine-3'-phosphate
  modified_base 12: mod_base = OTHER; note = 2'-O-methyladenosine-3'-phosphate
  modified_base 13: mod_base = OTHER; note = 2'-O-methylcytidine-3'-phosphate
  modified_base 14: mod_base = OTHER; note = 2'-deoxy-2'-fluorouridine-3'-phosphate
  modified_base 15: mod_base = OTHER; note = 2'-O-methylguanosine-3'-phosphate
  modified_base 16: mod_base = OTHER; note = 2'-deoxy-2'-fluorouridine-3'-phosphate
  modified_base 17: mod_base = OTHER; note = 2'-O-methylcytidine-3'-phosphate
  modified_base 18: mod_base = OTHER; note = 2'-O-methylcytidine-3'-phosphate
  modified_base 19: mod_base = OTHER; note = 2'-O-methylcytidine-3'-phosphate
  modified_base 20: mod_base = OTHER; note = 2'-O-methyluridine-3'-phosphate
  modified_base 21: mod_base = OTHER; note = 2'-O-methyluridine-3'-phosphorothioate
  modified_base 22: mod_base = OTHER; note = 2'-O-methyluridine-3'-phosphorothioate
  modified_base 23: mod_base = OTHER; note = 2'-O-methyluridine
acactgagaatactgtccctttt

SEQ ID NO: 376 - RNA, 23 nt, synthetic construct
  source 1..23: mol_type = other RNA
aaaagggacagtattctcagtgc

SEQ ID NO: 377 - RNA, 21 nt, synthetic construct
  source 1..21: mol_type = other RNA
  modified_base 1: mod_base = OTHER; note = 2'-O-methylcytidine-3'-phosphorothioate
  modified_base 2: mod_base = OTHER; note = 2'-O-methyluridine-3'-phosphorothioate
  modified_base 3: mod_base = OTHER; note = 2'-O-methyluridine-3'-phosphate
  modified_base 4: mod_base = OTHER; note = 2'-O-methyladenosine-3'-phosphate
  modified_base 5: mod_base = OTHER; note = 2'-O-methyladenosine-3'-phosphate
  modified_base 6: mod_base = OTHER; note = 2'-O-methyladenosine-3'-phosphate
  modified_base 7: mod_base = OTHER; note = 2'-deoxy-2'-fluoroadenosine-3'-phosphate
  modified_base 8: mod_base = OTHER; note = 2'-O-methylguanosine-3'-phosphate
  modified_base 9: mod_base = OTHER; note = 2'-deoxy-2'-fluoroguanosine-3'-phosphate
  modified_base 10: mod_base = OTHER; note = 2'-deoxy-2'-fluoroguanosine-3'-phosphate
  modified_base 11: mod_base = OTHER; note = 2'-deoxy-2'-fluoroadenosine-3'-phosphate
  modified_base 12: mod_base = OTHER; note = 2'-O-methylcytidine-3'-phosphate
  modified_base 13: mod_base = OTHER; note = 2'-O-methyladenosine-3'-phosphate
  modified_base 14: mod_base = OTHER; note = 2'-O-methylguanosine-3'-phosphate
  modified_base 15: mod_base = OTHER; note = 2'-O-methyluridine-3'-phosphate
  modified_base 16: mod_base = OTHER; note = 2'-O-methyladenosine-3'-phosphate
  modified_base 17: mod_base = OTHER; note = 2'-O-methyluridine-3'-phosphate
  modified_base 18: mod_base = OTHER; note = 2'-O-methyluridine-3'-phosphate
  modified_base 19: mod_base = OTHER; note = 2'-O-methylcytidine-3'-phosphate
  modified_base 20: mod_base = OTHER; note = 2'-O-methyluridine-3'-phosphate
  modified_base 21: mod_base = OTHER; note = 2'-O-methyluridine-3'-phosphate ((2S,4R)-1-[29-[[2-(acetylamino)-2-deoxy-beta-D-galactopyra nosyl]oxy]-14,14-bis[[3-[[3-[[5-[[2-(acetylamino)-2-deoxy-b eta-D-galactopyranosyl]oxy]-1-oxopentyl]amino]propyl]amino] -3-oxopropoxy]methyl]-1,12,19,25-tetraoxo-16-oxa-13,20,24-t riazanonacos-1-yl]-4-hydroxy-2-pyrrolidinyl)methyl ester
cttaaaagggacagtattctt

SEQ ID NO: 378 - RNA, 23 nt, synthetic construct
  source 1..23: mol_type = other RNA
  modified_base 1: mod_base = OTHER; note = 2'-O-methyladenosine-3'-phosphorothioate
  modified_base 2: mod_base = OTHER; note = 2'-deoxy-2'-fluoroadenosine-3'-phosphorothioate
  modified_base 3: mod_base = OTHER; note = 2'-O-methylguanosine-3'-phosphate
  modified_base 4: mod_base = OTHER; note = 2'-O-methyladenosine-3'-phosphate
  modified_base 5: mod_base = OTHER; note = 2'-O-methyladenosine-3'-phosphate
  modified_base 6: mod_base = OTHER; note = 2'-deoxy-2'-fluorouridine-3'-phosphate
  modified_base 7: mod_base = OTHER; note = 2'-O-methyladenosine-3'-phosphate
  modified_base 8: mod_base = OTHER; note = 2'-deoxy-2'-fluorocytidine-3'-phosphate
  modified_base 9: mod_base = OTHER; note = 2'-deoxy-2'-fluorouridine-3'-phosphate
  modified_base 10: mod_base = OTHER; note = 2'-O-methylguanosine-3'-phosphate
  modified_base 11: mod_base = OTHER; note = 2'-O-methyluridine-3'-phosphate
  modified_base 12: mod_base = OTHER; note = 2'-O-methylcytidine-3'-phosphate
  modified_base 13: mod_base = OTHER; note = 2'-O-methylcytidine-3'-phosphate
  modified_base 14: mod_base = OTHER; note = 2'-deoxy-2'-fluorocytidine-3'-phosphate
  modified_base 15: mod_base = OTHER; note = 2'-O-methyluridine-3'-phosphate
  modified_base 16: mod_base = OTHER; note = 2'-deoxy-2'-fluorouridine-3'-phosphate
  modified_base 17: mod_base = OTHER; note = 2'-O-methyluridine-3'-phosphate
  modified_base 18: mod_base = OTHER; note = 2'-O-methyluridine-3'-phosphate
  modified_base 19: mod_base = OTHER; note = 2'-O-methyladenosine-3'-phosphate
  modified_base 20: mod_base = OTHER; note = 2'-O-methyladenosine-3'-phosphate
  modified_base 21: mod_base = OTHER; note = 2'-O-methylguanosine-3'-phosphorothioate
  modified_base 22: mod_base = OTHER; note = 2'-O-methylcytidine-3'-phosphorothioate
  modified_base 23: mod_base = OTHER; note = 2'-O-methyladenosine
aagaatactgtcccttttaagca

SEQ ID NO: 379 - RNA, 23 nt, synthetic construct
  source 1..23: mol_type = other RNA
tgcttaaaagggacagtattctc

SEQ ID NO: 380 - RNA, 21 nt, synthetic construct
  source 1..21: mol_type = other RNA
  modified_base 1: mod_base = OTHER; note = 2'-O-methylcytidine-3'-phosphorothioate
  modified_base 2: mod_base = OTHER; note = 2'-O-methyluridine-3'-phosphorothioate
  modified_base 3: mod_base = OTHER; note = 2'-O-methylcytidine-3'-phosphate
  modified_base 4: mod_base = OTHER; note = 2'-O-methylcytidine-3'-phosphate
  modified_base 5: mod_base = OTHER; note = 2'-O-methylcytidine-3'-phosphate
  modified_base 6: mod_base = OTHER; note = 2'-O-methyladenosine-3'-phosphate
  modified_base 7: mod_base = OTHER; note = 2'-deoxy-2'-fluoroadenosine-3'-phosphate
  modified_base 8: mod_base = OTHER; note = 2'-O-methyluridine-3'-phosphate
  modified_base 9: mod_base = OTHER; note = 2'-deoxy-2'-fluoroadenosine-3'-phosphate
  modified_base 10: mod_base = OTHER; note = 2'-deoxy-2'-fluoroadenosine-3'-phosphate
  modified_base 11: mod_base = OTHER; note = 2'-deoxy-2'-fluoroadenosine-3'-phosphate
  modified_base 12: mod_base = OTHER; note = 2'-O-methylguanosine-3'-phosphate
  modified_base 13: mod_base = OTHER; note = 2'-O-methylcytidine-3'-phosphate
  modified_base 14: mod_base = OTHER; note = 2'-O-methyluridine-3'-phosphate
  modified_base 15: mod_base = OTHER; note = 2'-O-methylguanosine-3'-phosphate
  modified_base 16: mod_base = OTHER; note = 2'-O-methylguanosine-3'-phosphate
  modified_base 17: mod_base = OTHER; note = 2'-O-methyladenosine-3'-phosphate
  modified_base 18: mod_base = OTHER; note = 2'-O-methylcytidine-3'-phosphate
  modified_base 19: mod_base = OTHER; note = 2'-O-methyladenosine-3'-phosphate
  modified_base 20: mod_base = OTHER; note = 2'-O-methyladenosine-3'-phosphate
  modified_base 21: mod_base = OTHER; note = 2'-O-methyluridine-3'-phosphate ((2S,4R)-1-[29-[[2-(acetylamino)-2-deoxy-beta-D-galactopyra nosyl]oxy]-14,14-bis[[3-[[3-[[5-[[2-(acetylamino)-2-deoxy-b eta-D-galactopyranosyl]oxy]-1-oxopentyl]amino]propyl]amino] -3-oxopropoxy]methyl]-1,12,19,25-tetraoxo-16-oxa-13,20,24-t riazanonacos-1-yl]-4-hydroxy-2-pyrrolidinyl)methyl ester
ctcccaataaagctggacaat

SEQ ID NO: 381 - RNA, 23 nt, synthetic construct
  source 1..23: mol_type = other RNA
  modified_base 1: mod_base = OTHER; note = 2'-O-methyladenosine-3'-phosphorothioate
  modified_base 2: mod_base = OTHER; note = 2'-deoxy-2'-fluorouridine-3'-phosphorothioate
  modified_base 3: mod_base = OTHER; note = 2'-O-methyluridine-3'-phosphate
  modified_base 4: mod_base = OTHER; note = 2'-O-methylguanosine-3'-phosphate
  modified_base 5: mod_base = OTHER; note = 2'-O-methyluridine-3'-phosphate
  modified_base 6: mod_base = OTHER; note = 2'-deoxy-2'-fluorocytidine-3'-phosphate
  modified_base 7: mod_base = OTHER; note = 2'-O-methylcytidine-3'-phosphate
  modified_base 8: mod_base = OTHER; note = 2'-deoxy-2'-fluoroadenosine-3'-phosphate
  modified_base 9: mod_base = OTHER; note = 2'-deoxy-2'-fluoroguanosine-3'-phosphate
  modified_base 10: mod_base = OTHER; note = 2'-O-methylcytidine-3'-phosphate
  modified_base 11: mod_base = OTHER; note = 2'-O-methyluridine-3'-phosphate
  modified_base 12: mod_base = OTHER; note = 2'-O-methyluridine-3'-phosphate
  modified_base 13: mod_base = OTHER; note = 2'-O-methyluridine-3'-phosphate
  modified_base 14: mod_base = OTHER; note = 2'-deoxy-2'-fluoroadenosine-3'-phosphate
  modified_base 15: mod_base = OTHER; note = 2'-O-methyluridine-3'-phosphate
  modified_base 16: mod_base = OTHER; note = 2'-deoxy-2'-fluorouridine-3'-phosphate
  modified_base 17: mod_base = OTHER; note = 2'-O-methylguanosine-3'-phosphate
  modified_base 18: mod_base = OTHER; note = 2'-O-methylguanosine-3'-phosphate
  modified_base 19: mod_base = OTHER; note = 2'-O-methylguanosine-3'-phosphate
  modified_base 20: mod_base = OTHER; note = 2'-O-methyladenosine-3'-phosphate
  modified_base 21: mod_base = OTHER; note = 2'-O-methylguanosine-3'-phosphorothioate
  modified_base 22: mod_base = OTHER; note = 2'-O-methylguanosine-3'-phosphorothioate
  modified_base 23: mod_base = OTHER; note = 2'-O-methylcytidine
attgtccagctttattgggaggc

SEQ ID NO: 382 - RNA, 23 nt, synthetic construct
  source 1..23: mol_type = other RNA
gcctcccaataaagctggacaag

SEQ ID NO: 383 - RNA, 21 nt, synthetic construct
  source 1..21: mol_type = other RNA
  modified_base 1: mod_base = OTHER; note = 2'-O-methyluridine-3'-phosphorothioate
  modified_base 2: mod_base = OTHER; note = 2'-O-methylguanosine-3'-phosphorothioate
  modified_base 3: mod_base = OTHER; note = 2'-O-methylcytidine-3'-phosphate
  modified_base 4: mod_base = OTHER; note = 2'-O-methyluridine-3'-phosphate
  modified_base 5: mod_base = OTHER; note = 2'-O-methyluridine-3'-phosphate
  modified_base 6: mod_base = OTHER; note = 2'-O-methyladenosine-3'-phosphate
  modified_base 7: mod_base = OTHER; note = 2'-deoxy-2'-fluoroadenosine-3'-phosphate
  modified_base 8: mod_base = OTHER; note = 2'-O-methyladenosine-3'-phosphate
  modified_base 9: mod_base = OTHER; note = 2'-deoxy-2'-fluoroadenosine-3'-phosphate
  modified_base 10: mod_base = OTHER; note = 2'-deoxy-2'-fluoroguanosine-3'-phosphate
  modified_base 11: mod_base = OTHER; note = 2'-deoxy-2'-fluoroguanosine-3'-phosphate
  modified_base 12: mod_base = OTHER; note = 2'-O-methylguanosine-3'-phosphate
  modified_base 13: mod_base = OTHER; note = 2'-O-methyladenosine-3'-phosphate
  modified_base 14: mod_base = OTHER; note = 2'-O-methylcytidine-3'-phosphate
  modified_base 15: mod_base = OTHER; note = 2'-O-methyladenosine-3'-phosphate
  modified_base 16: mod_base = OTHER; note = 2'-O-methylguanosine-3'-phosphate
  modified_base 17: mod_base = OTHER; note = 2'-O-methyluridine-3'-phosphate
  modified_base 18: mod_base = OTHER; note = 2'-O-methyladenosine-3'-phosphate
  modified_base 19: mod_base = OTHER; note = 2'-O-methyluridine-3'-phosphate
  modified_base 20: mod_base = OTHER; note = 2'-O-methyluridine-3'-phosphate
  modified_base 21: mod_base = OTHER; note = 2'-O-methyluridine-3'-phosphate ((2S,4R)-1-[29-[[2-(acetylamino)-2-deoxy-beta-D-galactopyra nosyl]oxy]-14,14-bis[[3-[[3-[[5-[[2-(acetylamino)-2-deoxy-b eta-D-galactopyranosyl]oxy]-1-oxopentyl]amino]propyl]amino] -3-oxopropoxy]methyl]-1,12,19,25-tetraoxo-16-oxa-13,20,24-t riazanonacos-1-yl]-4-hydroxy-2-pyrrolidinyl)methyl ester
tgcttaaaagggacagtattt

SEQ ID NO: 384 - RNA, 23 nt, synthetic construct
  source 1..23: mol_type = other RNA
  modified_base 1: mod_base = OTHER; note = 2'-O-methyladenosine-3'-phosphorothioate
  modified_base 2: mod_base = OTHER; note = 2'-deoxy-2'-fluoroadenosine-3'-phosphorothioate
  modified_base 3: mod_base = OTHER; note = 2'-O-methyladenosine-3'-phosphate
  modified_base 4: mod_base = OTHER; note = 2'-O-methyluridine-3'-phosphate
  modified_base 5: mod_base = OTHER; note = 2'-O-methyladenosine-3'-phosphate
  modified_base 6: mod_base = OTHER; note = 2'-deoxy-2'-fluorocytidine-3'-phosphate
  modified_base 7: mod_base = OTHER; note = 2'-O-methyluridine-3'-phosphate
  modified_base 8: mod_base = OTHER; note = 2'-deoxy-2'-fluoroguanosine-3'-phosphate
  modified_base 9: mod_base = OTHER; note = 2'-deoxy-2'-fluorouridine-3'-phosphate
  modified_base 10: mod_base = OTHER; note = 2'-O-methylcytidine-3'-phosphate
  modified_base 11: mod_base = OTHER; note = 2'-O-methylcytidine-3'-phosphate
  modified_base 12: mod_base = OTHER; note = 2'-O-methylcytidine-3'-phosphate
  modified_base 13: mod_base = OTHER; note = 2'-O-methyluridine-3'-phosphate
  modified_base 14: mod_base = OTHER; note = 2'-deoxy-2'-fluorouridine-3'-phosphate
  modified_base 15: mod_base = OTHER; note = 2'-O-methyluridine-3'-phosphate
  modified_base 16: mod_base = OTHER; note = 2'-deoxy-2'-fluorouridine-3'-phosphate
  modified_base 17: mod_base = OTHER; note = 2'-O-methyladenosine-3'-phosphate
  modified_base 18: mod_base = OTHER; note = 2'-O-methyladenosine-3'-phosphate
  modified_base 19: mod_base = OTHER; note = 2'-O-methylguanosine-3'-phosphate
  modified_base 20: mod_base = OTHER; note = 2'-O-methylcytidine-3'-phosphate
  modified_base 21: mod_base = OTHER; note = 2'-O-methyladenosine-3'-phosphorothioate
  modified_base 22: mod_base = OTHER; note = 2'-O-methyladenosine-3'-phosphorothioate
  modified_base 23: mod_base = OTHER; note = 2'-O-methylcytidine
aaatactgtcccttttaagcaac

SEQ ID NO: 385 - RNA, 23 nt, synthetic construct
  source 1..23: mol_type = other RNA
gttgcttaaaagggacagtattc

SEQ ID NO: 386 - RNA, 21 nt, synthetic construct
  source 1..21: mol_type = other RNA
  modified_base 1: mod_base = OTHER; note = 2'-O-methylcytidine-3'-phosphorothioate
  modified_base 2: mod_base = OTHER; note = 2'-O-methylcytidine-3'-phosphorothioate
  modified_base 3: mod_base = OTHER; note = 2'-O-methyluridine-3'-phosphate
  modified_base 4: mod_base = OTHER; note = 2'-O-methylcytidine-3'-phosphate
  modified_base 5: mod_base = OTHER; note = 2'-O-methylcytidine-3'-phosphate
  modified_base 6: mod_base = OTHER; note = 2'-O-methylcytidine-3'-phosphate
  modified_base 7: mod_base = OTHER; note = 2'-deoxy-2'-fluoroadenosine-3'-phosphate
  modified_base 8: mod_base = OTHER; note = 2'-O-methyladenosine-3'-phosphate
  modified_base 9: mod_base = OTHER; note = 2'-deoxy-2'-fluorouridine-3'-phosphate
  modified_base 10: mod_base = OTHER; note = 2'-deoxy-2'-fluoroadenosine-3'-phosphate
  modified_base 11: mod_base = OTHER; note = 2'-deoxy-2'-fluoroadenosine-3'-phosphate
  modified_base 12: mod_base = OTHER; note = 2'-O-methyladenosine-3'-phosphate
  modified_base 13: mod_base = OTHER; note = 2'-O-methylguanosine-3'-phosphate
  modified_base 14: mod_base = OTHER; note = 2'-O-methylcytidine-3'-phosphate
  modified_base 15: mod_base = OTHER; note = 2'-O-methyluridine-3'-phosphate
  modified_base 16: mod_base = OTHER; note = 2'-O-methylguanosine-3'-phosphate
  modified_base 17: mod_base = OTHER; note = 2'-O-methylguanosine-3'-phosphate
  modified_base 18: mod_base = OTHER; note = 2'-O-methyladenosine-3'-phosphate
  modified_base 19: mod_base = OTHER; note = 2'-O-methylcytidine-3'-phosphate
  modified_base 20: mod_base = OTHER; note = 2'-O-methyladenosine-3'-phosphate
  modified_base 21: mod_base = OTHER; note = 2'-O-methyluridine-3'-phosphate ((2S,4R)-1-[29-[[2-(acetylamino)-2-deoxy-beta-D-galactopyra nosyl]oxy]-14,14-bis[[3-[[3-[[5-[[2-(acetylamino)-2-deoxy-b eta-D-galactopyranosyl]oxy]-1-oxopentyl]amino]propyl]amino] -3-oxopropoxy]methyl]-1,12,19,25-tetraoxo-16-oxa-13,20,24-t riazanonacos-1-yl]-4-hydroxy-2-pyrrolidinyl)methyl ester
cctcccaataaagctggacat

SEQ ID NO: 387 - RNA, 23 nt, synthetic construct
  source 1..23: mol_type = other RNA
  modified_base 1: mod_base = OTHER; note = 2'-O-methyladenosine-3'-phosphorothioate
  modified_base 2: mod_base = OTHER; note = 2'-deoxy-2'-fluorouridine-3'-phosphorothioate
  modified_base 3: mod_base = OTHER; note = 2'-O-methylguanosine-3'-phosphate
  modified_base 4: mod_base = OTHER; note = 2'-O-methyluridine-3'-phosphate
  modified_base 5: mod_base = OTHER; note = 2'-O-methylcytidine-3'-phosphate
  modified_base 6: mod_base = OTHER; note = 2'-deoxy-2'-fluorocytidine-3'-phosphate
  modified_base 7: mod_base = OTHER; note = 2'-O-methyladenosine-3'-phosphate
  modified_base 8: mod_base = OTHER; note = 2'-deoxy-2'-fluoroguanosine-3'-phosphate
  modified_base 9: mod_base = OTHER; note = 2'-deoxy-2'-fluorocytidine-3'-phosphate
  modified_base 10: mod_base = OTHER; note = 2'-O-methyluridine-3'-phosphate
  modified_base 11: mod_base = OTHER; note = 2'-O-methyluridine-3'-phosphate
  modified_base 12: mod_base = OTHER; note = 2'-O-methyluridine-3'-phosphate
  modified_base 13: mod_base = OTHER; note = 2'-O-methyladenosine-3'-phosphate
  modified_base 14: mod_base = OTHER; note = 2'-deoxy-2'-fluorouridine-3'-phosphate
  modified_base 15: mod_base = OTHER; note = 2'-O-methyluridine-3'-phosphate
  modified_base 16: mod_base = OTHER; note = 2'-deoxy-2'-fluoroguanosine-3'-phosphate
  modified_base 17: mod_base = OTHER; note = 2'-O-methylguanosine-3'-phosphate
  modified_base 18: mod_base = OTHER; note = 2'-O-methylguanosine-3'-phosphate
  modified_base 19: mod_base = OTHER; note = 2'-O-methyladenosine-3'-phosphate
  modified_base 20: mod_base = OTHER; note = 2'-O-methylguanosine-3'-phosphate
  modified_base 21: mod_base = OTHER; note = 2'-O-methylguanosine-3'-phosphorothioate
  modified_base 22: mod_base = OTHER; note = 2'-O-methylcytidine-3'-phosphorothioate
  modified_base 23: mod_base = OTHER; note = 2'-O-methylcytidine
atgtccagctttattgggaggcc

SEQ ID NO: 388 - RNA, 23 nt, synthetic construct
  source 1..23: mol_type = other RNA
ggcctcccaataaagctggacaa

SEQ ID NO: 389 - RNA, 21 nt, synthetic construct
  source 1..21: mol_type = other RNA
  modified_base 1: mod_base = OTHER; note = 2'-O-methylguanosine-3'-phosphorothioate
  modified_base 2: mod_base = OTHER; note = 2'-O-methylcytidine-3'-phosphorothioate
  modified_base 3: mod_base = OTHER; note = 2'-O-methyluridine-3'-phosphate
  modified_base 4: mod_base = OTHER; note = 2'-O-methyluridine-3'-phosphate
  modified_base 5: mod_base = OTHER; note = 2'-O-methyladenosine-3'-phosphate
  modified_base 6: mod_base = OTHER; note = 2'-O-methyladenosine-3'-phosphate
  modified_base 7: mod_base = OTHER; note = 2'-deoxy-2'-fluoroadenosine-3'-phosphate
  modified_base 8: mod_base = OTHER; note = 2'-O-methyladenosine-3'-phosphate
  modified_base 9: mod_base = OTHER; note = 2'-deoxy-2'-fluoroguanosine-3'-phosphate
  modified_base 10: mod_base = OTHER; note = 2'-deoxy-2'-fluoroguanosine-3'-phosphate
  modified_base 11: mod_base = OTHER; note = 2'-deoxy-2'-fluoroguanosine-3'-phosphate
  modified_base 12: mod_base = OTHER; note = 2'-O-methyladenosine-3'-phosphate
  modified_base 13: mod_base = OTHER; note = 2'-O-methylcytidine-3'-phosphate
  modified_base 14: mod_base = OTHER; note = 2'-O-methyladenosine-3'-phosphate
  modified_base 15: mod_base = OTHER; note = 2'-O-methylguanosine-3'-phosphate
  modified_base 16: mod_base = OTHER; note = 2'-O-methyluridine-3'-phosphate
  modified_base 17: mod_base = OTHER; note = 2'-O-methyladenosine-3'-phosphate
  modified_base 18: mod_base = OTHER; note = 2'-O-methyluridine-3'-phosphate
  modified_base 19: mod_base = OTHER; note = 2'-O-methyluridine-3'-phosphate
  modified_base 20: mod_base = OTHER; note = 2'-O-methylcytidine-3'-phosphate
  modified_base 21: mod_base = OTHER; note = 2'-O-methyluridine-3'-phosphate ((2S,4R)-1-[29-[[2-(acetylamino)-2-deoxy-beta-D-galactopyra nosyl]oxy]-14,14-bis[[3-[[3-[[5-[[2-(acetylamino)-2-deoxy-b eta-D-galactopyranosyl]oxy]-1-oxopentyl]amino]propyl]amino] -3-oxopropoxy]methyl]-1,12,19,25-tetraoxo-16-oxa-13,20,24-t riazanonacos-1-yl]-4-hydroxy-2-pyrrolidinyl)methyl ester
gcttaaaagggacagtattct

SEQ ID NO: 390 - RNA, 23 nt, synthetic construct
  source 1..23: mol_type = other RNA
  modified_base 1: mod_base = OTHER; note = 2'-O-methyladenosine-3'-phosphorothioate
  modified_base 2: mod_base = OTHER; note = 2'-deoxy-2'-fluoroguanosine-3'-phosphorothioate
  modified_base 3: mod_base = OTHER; note = 2'-O-methyladenosine-3'-phosphate
  modified_base 4: mod_base = OTHER; note = 2'-O-methyladenosine-3'-phosphate
  modified_base 5: mod_base = OTHER; note = 2'-O-methyluridine-3'-phosphate
  modified_base 6: mod_base = OTHER; note = 2'-deoxy-2'-fluoroadenosine-3'-phosphate
  modified_base 7: mod_base = OTHER; note = 2'-O-methylcytidine-3'-phosphate
  modified_base 8: mod_base = OTHER; note = 2'-deoxy-2'-fluorouridine-3'-phosphate
  modified_base 9: mod_base = OTHER; note = 2'-deoxy-2'-fluoroguanosine-3'-phosphate
  modified_base 10: mod_base = OTHER; note = 2'-O-methyluridine-3'-phosphate
  modified_base 11: mod_base = OTHER; note = 2'-O-methylcytidine-3'-phosphate
  modified_base 12: mod_base = OTHER; note = 2'-O-methylcytidine-3'-phosphate
  modified_base 13: mod_base = OTHER; note = 2'-O-methylcytidine-3'-phosphate
  modified_base 14: mod_base = OTHER; note = 2'-deoxy-2'-fluorouridine-3'-phosphate
  modified_base 15: mod_base = OTHER; note = 2'-O-methyluridine-3'-phosphate
  modified_base 16: mod_base = OTHER; note = 2'-deoxy-2'-fluorouridine-3'-phosphate
  modified_base 17: mod_base = OTHER; note = 2'-O-methyluridine-3'-phosphate
  modified_base 18: mod_base = OTHER; note = 2'-O-methyladenosine-3'-phosphate
  modified_base 19: mod_base = OTHER; note = 2'-O-methyladenosine-3'-phosphate
  modified_base 20: mod_base = OTHER; note = 2'-O-methylguanosine-3'-phosphate
  modified_base 21: mod_base = OTHER; note = 2'-O-methylcytidine-3'-phosphorothioate
  modified_base 22: mod_base = OTHER; note = 2'-O-methyladenosine-3'-phosphorothioate
  modified_base 23: mod_base = OTHER; note = 2'-O-methyladenosine
agaatactgtcccttttaagcaa

SEQ ID NO: 391 - RNA, 23 nt, synthetic construct
  source 1..23: mol_type = other RNA
ttgcttaaaagggacagtattct

SEQ ID NO: 392 - RNA, 23 nt, synthetic construct
  source 1..23: mol_type = other RNA
  modified_base 1: mod_base = OTHER; note = 2'-O-methyluridine-3'-phosphorothioate
  modified_base 2: mod_base = OTHER; note = 2'-deoxy-2'-fluoroadenosine-3'-phosphorothioate
  modified_base 3: mod_base = OTHER; note = 2'-O-methylguanosine-3'-phosphate
  modified_base 4: mod_base = OTHER; note = 2'-O-methyladenosine-3'-phosphate
  modified_base 5: mod_base = OTHER; note = 2'-O-methyladenosine-3'-phosphate
  modified_base 6: mod_base = OTHER; note = 2'-deoxy-2'-fluorouridine-3'-phosphate
  modified_base 7: mod_base = OTHER; note = 2'-O-methyladenosine-3'-phosphate
  modified_base 8: mod_base = OTHER; note = 2'-deoxy-2'-fluorocytidine-3'-phosphate
  modified_base 9: mod_base = OTHER; note = 2'-deoxy-2'-fluorouridine-3'-phosphate
  modified_base 10: mod_base = OTHER; note = 2'-O-methylguanosine-3'-phosphate
  modified_base 11: mod_base = OTHER; note = 2'-O-methyluridine-3'-phosphate
  modified_base 12: mod_base = OTHER; note = 2'-O-methylcytidine-3'-phosphate
  modified_base 13: mod_base = OTHER; note = 2'-O-methylcytidine-3'-phosphate
  modified_base 14: mod_base = OTHER; note = 2'-deoxy-2'-fluorocytidine-3'-phosphate
  modified_base 15: mod_base = OTHER; note = 2'-O-methyluridine-3'-phosphate
  modified_base 16: mod_base = OTHER; note = 2'-deoxy-2'-fluorouridine-3'-phosphate
  modified_base 17: mod_base = OTHER; note = 2'-O-methyluridine-3'-phosphate
  modified_base 18: mod_base = OTHER; note = 2'-O-methyluridine-3'-phosphate
  modified_base 19: mod_base = OTHER; note = 2'-O-methyladenosine-3'-phosphate
  modified_base 20: mod_base = OTHER; note = 2'-O-methyladenosine-3'-phosphate
  modified_base 21: mod_base = OTHER; note = 2'-O-methylguanosine-3'-phosphorothioate
  modified_base 22: mod_base = OTHER; note = 2'-O-methylcytidine-3'-phosphorothioate
  modified_base 23: mod_base = OTHER; note = 2'-O-methyladenosine
tagaatactgtcccttttaagca

SEQ ID NO: 393 - RNA, 21 nt, synthetic construct
  source 1..21: mol_type = other RNA
cttaaaagggacagtattcta

SEQ ID NO: 394 - RNA, 21 nt, synthetic construct
  source 1..21: mol_type = other RNA
  modified_base 1: mod_base = OTHER; note = 2'-O-methylcytidine-3'-phosphorothioate
  modified_base 2: mod_base = OTHER; note = 2'-O-methylcytidine-3'-phosphorothioate
  modified_base 3: mod_base = OTHER; note = 2'-O-methylcytidine-3'-phosphate
  modified_base 4: mod_base = OTHER; note = 2'-O-methyladenosine-3'-phosphate
  modified_base 5: mod_base = OTHER; note = 2'-O-methyladenosine-3'-phosphate
  modified_base 6: mod_base = OTHER; note = 2'-O-methyluridine-3'-phosphate
  modified_base 7: mod_base = OTHER; note = 2'-deoxy-2'-fluoroadenosine-3'-phosphate
  modified_base 8: mod_base = OTHER; note = 2'-O-methyladenosine-3'-phosphate
  modified_base 9: mod_base = OTHER; note = 2'-deoxy-2'-fluoroadenosine-3'-phosphate
  modified_base 10: mod_base = OTHER; note = 2'-deoxy-2'-fluoroguanosine-3'-phosphate
  modified_base 11: mod_base = OTHER; note = 2'-deoxy-2'-fluorocytidine-3'-phosphate
  modified_base 12: mod_base = OTHER; note = 2'-O-methyluridine-3'-phosphate
  modified_base 13: mod_base = OTHER; note = 2'-O-methylguanosine-3'-phosphate
  modified_base 14: mod_base = OTHER; note = 2'-O-methylguanosine-3'-phosphate
  modified_base 15: mod_base = OTHER; note = 2'-O-methyladenosine-3'-phosphate
  modified_base 16: mod_base = OTHER; note = 2'-O-methylcytidine-3'-phosphate
  modified_base 17: mod_base = OTHER; note = 2'-O-methyladenosine-3'-phosphate
  modified_base 18: mod_base = OTHER; note = 2'-O-methyladenosine-3'-phosphate
  modified_base 19: mod_base = OTHER; note = 2'-O-methylguanosine-3'-phosphate
  modified_base 20: mod_base = OTHER; note = 2'-O-methyladenosine-3'-phosphate
  modified_base 21: mod_base = OTHER; note = 2'-O-methyluridine-3'-phosphate ((2S,4R)-1-[29-[[2-(acetylamino)-2-deoxy-beta-D-galactopyra nosyl]oxy]-14,14-bis[[3-[[3-[[5-[[2-(acetylamino)-2-deoxy-b eta-D-galactopyranosyl]oxy]-1-oxopentyl]amino]propyl]amino] -3-oxopropoxy]methyl]-1,12,19,25-tetraoxo-16-oxa-13,20,24-t riazanonacos-1-yl]-4-hydroxy-2-pyrrolidinyl)methyl ester
cccaataaagctggacaagat

SEQ ID NO: 395 - RNA, 23 nt, synthetic construct
  source 1..23: mol_type = other RNA
  modified_base 1: mod_base = OTHER; note = 2'-O-methyladenosine-3'-phosphorothioate
  modified_base 2: mod_base = OTHER; note = 2'-deoxy-2'-fluorouridine-3'-phosphorothioate
  modified_base 3: mod_base = OTHER; note = 2'-O-methylcytidine-3'-phosphate
  modified_base 4: mod_base = OTHER; note = 2'-O-methyluridine-3'-phosphate
  modified_base 5: mod_base = OTHER; note = 2'-O-methyluridine-3'-phosphate
  modified_base 6: mod_base = OTHER; note = 2'-deoxy-2'-fluoroguanosine-3'-phosphate
  modified_base 7: mod_base = OTHER; note = 2'-O-methyluridine-3'-phosphate
  modified_base 8: mod_base = OTHER; note = 2'-deoxy-2'-fluorocytidine-3'-phosphate
  modified_base 9: mod_base = OTHER; note = 2'-deoxy-2'-fluorocytidine-3'-phosphate
  modified_base 10: mod_base = OTHER; note = 2'-O-methyladenosine-3'-phosphate
  modified_base 11: mod_base = OTHER; note = 2'-O-methylguanosine-3'-phosphate
  modified_base 12: mod_base = OTHER; note = 2'-O-methylcytidine-3'-phosphate
  modified_base 13: mod_base = OTHER; note = 2'-O-methyluridine-3'-phosphate
  modified_base 14: mod_base = OTHER; note = 2'-deoxy-2'-fluorouridine-3'-phosphate
  modified_base 15: mod_base = OTHER; note = 2'-O-methyluridine-3'-phosphate
  modified_base 16: mod_base = OTHER; note = 2'-deoxy-2'-fluoroadenosine-3'-phosphate
  modified_base 17: mod_base = OTHER; note = 2'-O-methyluridine-3'-phosphate
  modified_base 18: mod_base = OTHER; note = 2'-O-methyluridine-3'-phosphate
  modified_base 19: mod_base = OTHER; note = 2'-O-methylguanosine-3'-phosphate
  modified_base 20: mod_base = OTHER; note = 2'-O-methylguanosine-3'-phosphate
  modified_base 21: mod_base = OTHER; note = 2'-O-methylguanosine-3'-phosphorothioate
  modified_base 22: mod_base = OTHER; note = 2'-O-methyladenosine-3'-phosphorothioate
  modified_base 23: mod_base = OTHER; note = 2'-O-methylguanosine
atcttgtccagctttattgggag

SEQ ID NO: 396 - RNA, 23 nt, synthetic construct
  source 1..23: mol_type = other RNA
ctcccaataaagctggacaagaa

SEQ ID NO: 397 - RNA, 21 nt, synthetic construct
  source 1..21: mol_type = other RNA
  modified_base 1: mod_base = OTHER; note = 2'-O-methylcytidine-3'-phosphorothioate
  modified_base 2: mod_base = OTHER; note = 2'-O-methyluridine-3'-phosphorothioate
  modified_base 3: mod_base = OTHER; note = 2'-O-methylguanosine-3'-phosphate
  modified_base 4: mod_base = OTHER; note = 2'-O-methylguanosine-3'-phosphate
  modified_base 5: mod_base = OTHER; note = 2'-O-methyladenosine-3'-phosphate
  modified_base 6: mod_base = OTHER; note = 2'-O-methylguanosine-3'-phosphate
  modified_base 7: mod_base = OTHER; note = 2'-deoxy-2'-fluorocytidine-3'-phosphate
  modified_base 8: mod_base = OTHER; note = 2'-O-methyladenosine-3'-phosphate
  modified_base 9: mod_base = OTHER; note = 2'-deoxy-2'-fluorocytidine-3'-phosphate
  modified_base 10: mod_base = OTHER; note = 2'-deoxy-2'-fluorocytidine-3'-phosphate
  modified_base 11: mod_base = OTHER; note = 2'-deoxy-2'-fluoroguanosine-3'-phosphate
  modified_base 12: mod_base = OTHER; note = 2'-O-methyluridine-3'-phosphate
  modified_base 13: mod_base = OTHER; note = 2'-O-methyluridine-3'-phosphate
  modified_base 14: mod_base = OTHER; note = 2'-O-methyladenosine-3'-phosphate
  modified_base 15: mod_base = OTHER; note = 2'-O-methyladenosine-3'-phosphate
  modified_base 16: mod_base = OTHER; note = 2'-O-methylguanosine-3'-phosphate
  modified_base 17: mod_base = OTHER; note = 2'-O-methylguanosine-3'-phosphate
  modified_base 18: mod_base = OTHER; note = 2'-O-methyladenosine-3'-phosphate
  modified_base 19: mod_base = OTHER; note = 2'-O-methylcytidine-3'-phosphate
  modified_base 20: mod_base = OTHER; note = 2'-O-methyladenosine-3'-phosphate
  modified_base 21: mod_base = OTHER; note = 2'-O-methyluridine-3'-phosphate ((2S,4R)-1-[29-[[2-(acetylamino)-2-deoxy-beta-D-galactopyra nosyl]oxy]-14,14-bis[[3-[[3-[[5-[[2-(acetylamino)-2-deoxy-b eta-D-galactopyranosyl]oxy]-1-oxopentyl]amino]propyl]amino] -3-oxopropoxy]methyl]-1,12,19,25-tetraoxo-16-oxa-13,20,24-t riazanonacos-1-yl]-4-hydroxy-2-pyrrolidinyl)methyl ester
ctggagcaccgttaaggacat

SEQ ID NO: 398 - RNA, 23 nt, synthetic construct
  source 1..23: mol_type = other RNA
  modified_base 1: mod_base = OTHER; note = 2'-O-methyladenosine-3'-phosphorothioate
  modified_base 2: mod_base = OTHER; note = 2'-deoxy-2'-fluorouridine-3'-phosphorothioate
  modified_base 3: mod_base = OTHER; note = 2'-O-methylguanosine-3'-phosphate
  modified_base 4: mod_base = OTHER; note = 2'-O-methyluridine-3'-phosphate
  modified_base 5: mod_base = OTHER; note = 2'-O-methylcytidine-3'-phosphate
  modified_base 6: mod_base = OTHER; note = 2'-deoxy-2'-fluorocytidine-3'-phosphate
  modified_base 7: mod_base = OTHER; note = 2'-O-methyluridine-3'-phosphate
  modified_base 8: mod_base = OTHER; note = 2'-deoxy-2'-fluorouridine-3'-phosphate
  modified_base 9: mod_base = OTHER; note = 2'-deoxy-2'-fluoroadenosine-3'-phosphate
  modified_base 10: mod_base = OTHER; note = 2'-O-methyladenosine-3'-phosphate
  modified_base 11: mod_base = OTHER; note = 2'-O-methylcytidine-3'-phosphate
  modified_base 12: mod_base = OTHER; note = 2'-O-methylguanosine-3'-phosphate
  modified_base 13: mod_base = OTHER; note = 2'-O-methylguanosine-3'-phosphate
  modified_base 14: mod_base = OTHER; note = 2'-deoxy-2'-fluorouridine-3'-phosphate
  modified_base 15: mod_base = OTHER; note = 2'-O-methylguanosine-3'-phosphate
  modified_base 16: mod_base = OTHER; note = 2'-deoxy-2'-fluorocytidine-3'-phosphate
  modified_base 17: mod_base = OTHER; note = 2'-O-methyluridine-3'-phosphate
  modified_base 18: mod_base = OTHER; note = 2'-O-methylcytidine-3'-phosphate
  modified_base 19: mod_base = OTHER; note = 2'-O-methylcytidine-3'-phosphate
  modified_base 20: mod_base = OTHER; note = 2'-O-methyladenosine-3'-phosphate
  modified_base 21: mod_base = OTHER; note = 2'-O-methylguanosine-3'-phosphorothioate
  modified_base 22: mod_base = OTHER; note = 2'-O-methyluridine-3'-phosphorothioate
  modified_base 23: mod_base = OTHER; note = 2'-O-methyladenosine
atgtccttaacggtgctccagta

SEQ ID NO: 399 - RNA, 23 nt, synthetic construct
  source 1..23: mol_type = other RNA
tactggagcaccgttaaggacaa

SEQ ID NO: 400 - RNA, 21 nt, synthetic construct
  source 1..21: mol_type = other RNA
  modified_base 1: mod_base = OTHER; note = 2'-O-methyladenosine-3'-phosphorothioate
  modified_base 2: mod_base = OTHER; note = 2'-O-methyladenosine-3'-phosphorothioate
  modified_base 3: mod_base = OTHER; note = 2'-O-methyladenosine-3'-phosphate
  modified_base 4: mod_base = OTHER; note = 2'-O-methylguanosine-3'-phosphate
  modified_base 5: mod_base = OTHER; note = 2'-O-methylguanosine-3'-phosphate
  modified_base 6: mod_base = OTHER; note = 2'-O-methylguanosine-3'-phosphate
  modified_base 7: mod_base = OTHER; note = 2'-deoxy-2'-fluoroadenosine-3'-phosphate
  modified_base 8: mod_base = OTHER; note = 2'-O-methylcytidine-3'-phosphate
  modified_base 9: mod_base = OTHER; note = 2'-deoxy-2'-fluoroadenosine-3'-phosphate
  modified_base 10: mod_base = OTHER; note = 2'-deoxy-2'-fluoroguanosine-3'-phosphate
  modified_base 11: mod_base = OTHER; note = 2'-deoxy-2'-fluorouridine-3'-phosphate
  modified_base 12: mod_base = OTHER; note = 2'-O-methyladenosine-3'-phosphate
  modified_base 13: mod_base = OTHER; note = 2'-O-methyluridine-3'-phosphate
  modified_base 14: mod_base = OTHER; note = 2'-O-methyluridine-3'-phosphate
  modified_base 15: mod_base = OTHER; note = 2'-O-methylcytidine-3'-phosphate
  modified_base 16: mod_base = OTHER; note = 2'-O-methyluridine-3'-phosphate
  modified_base 17: mod_base = OTHER; note = 2'-O-methylcytidine-3'-phosphate
  modified_base 18: mod_base = OTHER; note = 2'-O-methyladenosine-3'-phosphate
  modified_base 19: mod_base = OTHER; note = 2'-O-methylguanosine-3'-phosphate
  modified_base 20: mod_base = OTHER; note = 2'-O-methyluridine-3'-phosphate
  modified_base 21: mod_base = OTHER; note = 2'-O-methyluridine-3'-phosphate ((2S,4R)-1-[29-[[2-(acetylamino)-2-deoxy-beta-D-galactopyra nosyl]oxy]-14,14-bis[[3-[[3-[[5-[[2-(acetylamino)-2-deoxy-b eta-D-galactopyranosyl]oxy]-1-oxopentyl]amino]propyl]amino] -3-oxopropoxy]methyl]-1,12,19,25-tetraoxo-16-oxa-13,20,24-t riazanonacos-1-yl]-4-hydroxy-2-pyrrolidinyl)methyl ester
aaagggacagtattctcagtt

SEQ ID NO: 401 - RNA, 23 nt, synthetic construct
  source 1..23: mol_type = other RNA
  modified_base 1: mod_base = OTHER; note = 2'-O-methyladenosine-3'-phosphorothioate
  modified_base 2: mod_base = OTHER; note = 2'-deoxy-2'-fluoroadenosine-3'-phosphorothioate
  modified_base 3: mod_base = OTHER; note = 2'-O-methylcytidine-3'-phosphate
  modified_base 4: mod_base = OTHER; note = 2'-O-methyluridine-3'-phosphate
  modified_base 5: mod_base = OTHER; note = 2'-O-methylguanosine-3'-phosphate
  modified_base 6: mod_base = OTHER; note = 2'-deoxy-2'-fluoroadenosine-3'-phosphate
  modified_base 7: mod_base = OTHER; note = 2'-O-methylguanosine-3'-phosphate
  modified_base 8: mod_base = OTHER; note = 2'-deoxy-2'-fluoroadenosine-3'-phosphate
  modified_base 9: mod_base = OTHER; note = 2'-deoxy-2'-fluoroadenosine-3'-phosphate
  modified_base 10: mod_base = OTHER; note = 2'-O-methyluridine-3'-phosphate
  modified_base 11: mod_base = OTHER; note = 2'-O-methyladenosine-3'-phosphate
  modified_base 12: mod_base = OTHER; note = 2'-O-methylcytidine-3'-phosphate
  modified_base 13: mod_base = OTHER; note = 2'-O-methyluridine-3'-phosphate
  modified_base 14: mod_base = OTHER; note = 2'-deoxy-2'-fluoroguanosine-3'-phosphate
  modified_base 15: mod_base = OTHER; note = 2'-O-methyluridine-3'-phosphate
  modified_base 16: mod_base = OTHER; note = 2'-deoxy-2'-fluorocytidine-3'-phosphate
  modified_base 17: mod_base = OTHER; note = 2'-O-methylcytidine-3'-phosphate
  modified_base 18: mod_base = OTHER; note = 2'-O-methylcytidine-3'-phosphate
  modified_base 19: mod_base = OTHER; note = 2'-O-methyluridine-3'-phosphate
  modified_base 20: mod_base = OTHER; note = 2'-O-methyluridine-3'-phosphate
  modified_base 21: mod_base = OTHER; note = 2'-O-methyluridine-3'-phosphorothioate
  modified_base 22: mod_base = OTHER; note = 2'-O-methyluridine-3'-phosphorothioate
  modified_base 23: mod_base = OTHER; note = 2'-O-methyladenosine
aactgagaatactgtccctttta

SEQ ID NO: 402 - RNA, 23 nt, synthetic construct
  source 1..23: mol_type = other RNA
taaaagggacagtattctcagtg

SEQ ID NO: 403 - RNA, 21 nt, synthetic construct
  source 1..21: mol_type = other RNA
  modified_base 1: mod_base = OTHER; note = 2'-O-methylguanosine-3'-phosphorothioate
  modified_base 2: mod_base = OTHER; note = 2'-O-methyluridine-3'-phosphorothioate
  modified_base 3: mod_base = OTHER; note = 2'-O-methylguanosine-3'-phosphate
  modified_base 4: mod_base = OTHER; note = 2'-O-methyladenosine-3'-phosphate
  modified_base 5: mod_base = OTHER; note = 2'-O-methylcytidine-3'-phosphate
  modified_base 6: mod_base = OTHER; note = 2'-O-methylcytidine-3'-phosphate
  modified_base 7: mod_base = OTHER; note = 2'-deoxy-2'-fluoroguanosine-3'-phosphate
  modified_base 8: mod_base = OTHER; note = 2'-O-methyladenosine-3'-phosphate
  modified_base 9: mod_base = OTHER; note = 2'-deoxy-2'-fluorouridine-3'-phosphate
  modified_base 10: mod_base = OTHER; note = 2'-deoxy-2'-fluoroguanosine-3'-phosphate
  modified_base 11: mod_base = OTHER; note = 2'-deoxy-2'-fluoroguanosine-3'-phosphate
  modified_base 12: mod_base = OTHER; note = 2'-O-methylcytidine-3'-phosphate
  modified_base 13: mod_base = OTHER; note = 2'-O-methyluridine-3'-phosphate
  modified_base 14: mod_base = OTHER; note = 2'-O-methyluridine-3'-phosphate
  modified_base 15: mod_base = OTHER; note = 2'-O-methylcytidine-3'-phosphate
  modified_base 16: mod_base = OTHER; note = 2'-O-methyladenosine-3'-phosphate
  modified_base 17: mod_base = OTHER; note = 2'-O-methylguanosine-3'-phosphate
  modified_base 18: mod_base = OTHER; note = 2'-O-methyluridine-3'-phosphate
  modified_base 19: mod_base = OTHER; note = 2'-O-methyluridine-3'-phosphate
  modified_base 20: mod_base = OTHER; note = 2'-O-methylcytidine-3'-phosphate
  modified_base 21: mod_base = OTHER; note = 2'-O-methyluridine-3'-phosphate ((2S,4R)-1-[29-[[2-(acetylamino)-2-deoxy-beta-D-galactopyra nosyl]oxy]-14,14-bis[[3-[[3-[[5-[[2-(acetylamino)-2-deoxy-b eta-D-galactopyranosyl]oxy]-1-oxopentyl]amino]propyl]amino] -3-oxopropoxy]methyl]-1,12,19,25-tetraoxo-16-oxa-13,20,24-t riazanonacos-1-yl]-4-hydroxy-2-pyrrolidinyl)methyl ester
gtgaccgatggcttcagttct

SEQ ID NO: 404 - RNA, 23 nt, synthetic construct
  source 1..23: mol_type = other RNA
  modified_base 1: mod_base = OTHER; note = 2'-O-methyladenosine-3'-phosphorothioate
  modified_base 2: mod_base = OTHER; note = 2'-deoxy-2'-fluoroguanosine-3'-phosphorothioate
  modified_base 3: mod_base = OTHER; note = 2'-O-methyladenosine-3'-phosphate
  modified_base 4: mod_base = OTHER; note = 2'-O-methyladenosine-3'-phosphate
  modified_base 5: mod_base = OTHER; note = 2'-O-methylcytidine-3'-phosphate
  modified_base 6: mod_base = OTHER; note = 2'-deoxy-2'-fluorouridine-3'-phosphate
  modified_base 7: mod_base = OTHER; note = 2'-O-methylguanosine-3'-phosphate
  modified_base 8: mod_base = OTHER; note = 2'-deoxy-2'-fluoroadenosine-3'-phosphate
  modified_base 9: mod_base = OTHER; note = 2'-deoxy-2'-fluoroadenosine-3'-phosphate
  modified_base 10: mod_base = OTHER; note = 2'-O-methylguanosine-3'-phosphate
  modified_base 11: mod_base = OTHER; note = 2'-O-methylcytidine-3'-phosphate
  modified_base 12: mod_base = OTHER; note = 2'-O-methylcytidine-3'-phosphate
  modified_base 13: mod_base = OTHER; note = 2'-O-methyladenosine-3'-phosphate
  modified_base 14: mod_base = OTHER; note = 2'-deoxy-2'-fluorouridine-3'-phosphate
  modified_base 15: mod_base = OTHER; note = 2'-O-methylcytidine-3'-phosphate
  modified_base 16: mod_base = OTHER; note = 2'-deoxy-2'-fluoroguanosine-3'-phosphate
  modified_base 17: mod_base = OTHER; note = 2'-O-methylguanosine-3'-phosphate
  modified_base 18: mod_base = OTHER; note = 2'-O-methyluridine-3'-phosphate
  modified_base 19: mod_base = OTHER; note = 2'-O-methylcytidine-3'-phosphate
  modified_base 20: mod_base = OTHER; note = 2'-O-methyladenosine-3'-phosphate
  modified_base 21: mod_base = OTHER; note = 2'-O-methylcytidine-3'-phosphorothioate
  modified_base 22: mod_base = OTHER; note = 2'-O-methylcytidine-3'-phosphorothioate
  modified_base 23: mod_base = OTHER; note = 2'-O-methylcytidine
agaactgaagccatcggtcaccc

SEQ ID NO: 405 - RNA, 23 nt, synthetic construct
  source 1..23: mol_type = other RNA
gggtgaccgatggcttcagttcc

SEQ ID NO: 406 - RNA, 21 nt, synthetic construct
  source 1..21: mol_type = other RNA
  modified_base 1: mod_base = OTHER; note = 2'-O-methyluridine-3'-phosphorothioate
  modified_base 2: mod_base = OTHER; note = 2'-O-methylcytidine-3'-phosphorothioate
  modified_base 3: mod_base = OTHER; note = 2'-O-methylcytidine-3'-phosphate
  modified_base 4: mod_base = OTHER; note = 2'-O-methylcytidine-3'-phosphate
  modified_base 5: mod_base = OTHER; note = 2'-O-methyladenosine-3'-phosphate
  modified_base 6: mod_base = OTHER; note = 2'-O-methyladenosine-3'-phosphate
  modified_base 7: mod_base = OTHER; note = 2'-deoxy-2'-fluorouridine-3'-phosphate
  modified_base 8: mod_base = OTHER; note = 2'-O-methyladenosine-3'-phosphate
  modified_base 9: mod_base = OTHER; note = 2'-deoxy-2'-fluoroadenosine-3'-phosphate
  modified_base 10: mod_base = OTHER; note = 2'-deoxy-2'-fluoroadenosine-3'-phosphate
  modified_base 11: mod_base = OTHER; note = 2'-deoxy-2'-fluoroguanosine-3'-phosphate
  modified_base 12: mod_base = OTHER; note = 2'-O-methylcytidine-3'-phosphate
  modified_base 13: mod_base = OTHER; note = 2'-O-methyluridine-3'-phosphate
  modified_base 14: mod_base = OTHER; note = 2'-O-methylguanosine-3'-phosphate
  modified_base 15: mod_base = OTHER; note = 2'-O-methylguanosine-3'-phosphate
  modified_base 16: mod_base = OTHER; note = 2'-O-methyladenosine-3'-phosphate
  modified_base 17: mod_base = OTHER; note = 2'-O-methylcytidine-3'-phosphate
  modified_base 18: mod_base = OTHER; note = 2'-O-methyladenosine-3'-phosphate
  modified_base 19: mod_base = OTHER; note = 2'-O-methyladenosine-3'-phosphate
  modified_base 20: mod_base = OTHER; note = 2'-O-methylguanosine-3'-phosphate
  modified_base 21: mod_base = OTHER; note = 2'-O-methyluridine-3'-phosphate ((2S,4R)-1-[29-[[2-(acetylamino)-2-deoxy-beta-D-galactopyra nosyl]oxy]-14,14-bis[[3-[[3-[[5-[[2-(acetylamino)-2-deoxy-b eta-D-galactopyranosyl]oxy]-1-oxopentyl]amino]propyl]amino] -3-oxopropoxy]methyl]-1,12,19,25-tetraoxo-16-oxa-13,20,24-t riazanonacos-1-yl]-4-hydroxy-2-pyrrolidinyl)methyl ester
tcccaataaagctggacaagt

SEQ ID NO: 407 - RNA, 23 nt, synthetic construct
  source 1..23: mol_type = other RNA
  modified_base 1: mod_base = OTHER; note = 2'-O-methyladenosine-3'-phosphorothioate
  modified_base 2: mod_base = OTHER; note = 2'-deoxy-2'-fluorocytidine-3'-phosphorothioate
  modified_base 3: mod_base = OTHER; note = 2'-O-methyluridine-3'-phosphate
  modified_base 4: mod_base = OTHER; note = 2'-O-methyluridine-3'-phosphate
  modified_base 5: mod_base = OTHER; note = 2'-O-methylguanosine-3'-phosphate
  modified_base 6: mod_base = OTHER; note = 2'-deoxy-2'-fluorouridine-3'-phosphate
  modified_base 7: mod_base = OTHER; note = 2'-O-methylcytidine-3'-phosphate
  modified_base 8: mod_base = OTHER; note = 2'-deoxy-2'-fluorocytidine-3'-phosphate
  modified_base 9: mod_base = OTHER; note = 2'-deoxy-2'-fluoroadenosine-3'-phosphate
  modified_base 10: mod_base = OTHER; note = 2'-O-methylguanosine-3'-phosphate
  modified_base 11: mod_base = OTHER; note = 2'-O-methylcytidine-3'-phosphate
  modified_base 12: mod_base = OTHER; note = 2'-O-methyluridine-3'-phosphate
  modified_base 13: mod_base = OTHER; note = 2'-O-methyluridine-3'-phosphate
  modified_base 14: mod_base = OTHER; note = 2'-deoxy-2'-fluorouridine-3'-phosphate
  modified_base 15: mod_base = OTHER; note = 2'-O-methyladenosine-3'-phosphate
  modified_base 16: mod_base = OTHER; note = 2'-deoxy-2'-fluorouridine-3'-phosphate
  modified_base 17: mod_base = OTHER; note = 2'-O-methyluridine-3'-phosphate
  modified_base 18: mod_base = OTHER; note = 2'-O-methylguanosine-3'-phosphate
  modified_base 19: mod_base = OTHER; note = 2'-O-methylguanosine-3'-phosphate
  modified_base 20: mod_base = OTHER; note = 2'-O-methylguanosine-3'-phosphate
  modified_base 21: mod_base = OTHER; note = 2'-O-methyladenosine-3'-phosphorothioate
  modified_base 22: mod_base = OTHER; note = 2'-O-methylguanosine-3'-phosphorothioate
  modified_base 23: mod_base = OTHER; note = 2'-O-methylguanosine
acttgtccagctttattgggagg

SEQ ID NO: 408 - RNA, 23 nt, synthetic construct
  source 1..23: mol_type = other RNA
cctcccaataaagctggacaaga

SEQ ID NO: 409 - RNA, 21 nt, synthetic construct
  source 1..21: mol_type = other RNA
  modified_base 1: mod_base = OTHER; note = 2'-O-methylguanosine-3'-phosphorothioate
  modified_base 2: mod_base = OTHER; note = 2'-O-methylguanosine-3'-phosphorothioate
  modified_base 3: mod_base = OTHER; note = 2'-O-methyluridine-3'-phosphate
  modified_base 4: mod_base = OTHER; note = 2'-O-methyluridine-3'-phosphate
  modified_base 5: mod_base = OTHER; note = 2'-O-methylguanosine-3'-phosphate
  modified_base 6: mod_base = OTHER; note = 2'-O-methylcytidine-3'-phosphate
  modified_base 7: mod_base = OTHER; note = 2'-deoxy-2'-fluorouridine-3'-phosphate
  modified_base 8: mod_base = OTHER; note = 2'-O-methyluridine-3'-phosphate
  modified_base 9: mod_base = OTHER; note = 2'-deoxy-2'-fluoroadenosine-3'-phosphate
  modified_base 10: mod_base = OTHER; note = 2'-deoxy-2'-fluoroadenosine-3'-phosphate
  modified_base 11: mod_base = OTHER; note = 2'-deoxy-2'-fluoroadenosine-3'-phosphate
  modified_base 12: mod_base = OTHER; note = 2'-O-methyladenosine-3'-phosphate
  modified_base 13: mod_base = OTHER; note = 2'-O-methylguanosine-3'-phosphate
  modified_base 14: mod_base = OTHER; note = 2'-O-methylguanosine-3'-phosphate
  modified_base 15: mod_base = OTHER; note = 2'-O-methylguanosine-3'-phosphate
  modified_base 16: mod_base = OTHER; note = 2'-O-methyladenosine-3'-phosphate
  modified_base 17: mod_base = OTHER; note = 2'-O-methylcytidine-3'-phosphate
  modified_base 18: mod_base = OTHER; note = 2'-O-methyladenosine-3'-phosphate
  modified_base 19: mod_base = OTHER; note = 2'-O-methylguanosine-3'-phosphate
  modified_base 20: mod_base = OTHER; note = 2'-O-methyluridine-3'-phosphate
  modified_base 21: mod_base = OTHER; note = 2'-O-methyluridine-3'-phosphate ((2S,4R)-1-[29-[[2-(acetylamino)-2-deoxy-beta-D-galactopyra nosyl]oxy]-14,14-bis[[3-[[3-[[5-[[2-(acetylamino)-2-deoxy-b eta-D-galactopyranosyl]oxy]-1-oxopentyl]amino]propyl]amino] -3-oxopropoxy]methyl]-1,12,19,25-tetraoxo-16-oxa-13,20,24-t riazanonacos-1-yl]-4-hydroxy-2-pyrrolidinyl)methyl ester
ggttgcttaaaagggacagtt

SEQ ID NO: 410 - RNA, 23 nt, synthetic construct
  source 1..23: mol_type = other RNA
  modified_base 1: mod_base = OTHER; note = 2'-O-methyladenosine-3'-phosphorothioate
  modified_base 2: mod_base = OTHER; note = 2'-deoxy-2'-fluoroadenosine-3'-phosphorothioate
  modified_base 3: mod_base = OTHER; note = 2'-O-methylcytidine-3'-phosphate
  modified_base 4: mod_base = OTHER; note = 2'-O-methyluridine-3'-phosphate
  modified_base 5: mod_base = OTHER; note = 2'-O-methylguanosine-3'-phosphate
  modified_base 6: mod_base = OTHER; note = 2'-deoxy-2'-fluorouridine-3'-phosphate
  modified_base 7: mod_base = OTHER; note = 2'-O-methylcytidine-3'-phosphate
  modified_base 8: mod_base = OTHER; note = 2'-deoxy-2'-fluorocytidine-3'-phosphate
  modified_base 9: mod_base = OTHER; note = 2'-deoxy-2'-fluorocytidine-3'-phosphate
  modified_base 10: mod_base = OTHER; note = 2'-O-methyluridine-3'-phosphate
  modified_base 11: mod_base = OTHER; note = 2'-O-methyluridine-3'-phosphate
  modified_base 12: mod_base = OTHER; note = 2'-O-methyluridine-3'-phosphate
  modified_base 13: mod_base = OTHER; note = 2'-O-methyluridine-3'-phosphate
  modified_base 14: mod_base = OTHER; note = 2'-deoxy-2'-fluoroadenosine-3'-phosphate
  modified_base 15: mod_base = OTHER; note = 2'-O-methyladenosine-3'-phosphate
  modified_base 16: mod_base = OTHER; note = 2'-deoxy-2'-fluoroguanosine-3'-phosphate
  modified_base 17: mod_base = OTHER; note = 2'-O-methylcytidine-3'-phosphate
  modified_base 18: mod_base = OTHER; note = 2'-O-methyladenosine-3'-phosphate
  modified_base 19: mod_base = OTHER; note = 2'-O-methyladenosine-3'-phosphate
  modified_base 20: mod_base = OTHER; note = 2'-O-methylcytidine-3'-phosphate
  modified_base 21: mod_base = OTHER; note = 2'-O-methylcytidine-3'-phosphorothioate
  modified_base 22: mod_base = OTHER; note = 2'-O-methyluridine-3'-phosphorothioate
  modified_base 23: mod_base = OTHER; note = 2'-O-methyladenosine
aactgtcccttttaagcaaccta

SEQ ID NO: 411 - RNA, 23 nt, synthetic construct
  source 1..23: mol_type = other RNA
taggttgcttaaaagggacagta

SEQ ID NO: 412 - RNA, 21 nt, synthetic construct
  source 1..21: mol_type = other RNA
  modified_base 1: mod_base = OTHER; note = 2'-O-methyluridine-3'-phosphorothioate
  modified_base 2: mod_base = OTHER; note = 2'-O-methylcytidine-3'-phosphorothioate
  modified_base 3: mod_base = OTHER; note = 2'-O-methyladenosine-3'-phosphate
  modified_base 4: mod_base = OTHER; note = 2'-O-methylguanosine-3'-phosphate
  modified_base 5: mod_base = OTHER; note = 2'-O-methyluridine-3'-phosphate
  modified_base 6: mod_base = OTHER; note = 2'-O-methyluridine-3'-phosphate
  modified_base 7: mod_base = OTHER; note = 2'-deoxy-2'-fluorocytidine-3'-phosphate
  modified_base 8: mod_base = OTHER; note = 2'-O-methylcytidine-3'-phosphate
  modified_base 9: mod_base = OTHER; note = 2'-deoxy-2'-fluorocytidine-3'-phosphate
  modified_base 10: mod_base = OTHER; note = 2'-deoxy-2'-fluorouridine-3'-phosphate
  modified_base 11: mod_base = OTHER; note = 2'-deoxy-2'-fluoroguanosine-3'-phosphate
  modified_base 12: mod_base = OTHER; note = 2'-O-methyladenosine-3'-phosphate
  modified_base 13: mod_base = OTHER; note = 2'-O-methyladenosine-3'-phosphate
  modified_base 14: mod_base = OTHER; note = 2'-O-methyladenosine-3'-phosphate
  modified_base 15: mod_base = OTHER; note = 2'-O-methylguanosine-3'-phosphate
  modified_base 16: mod_base = OTHER; note = 2'-O-methyladenosine-3'-phosphate
  modified_base 17: mod_base = OTHER; note = 2'-O-methylcytidine-3'-phosphate
  modified_base 18: mod_base = OTHER; note = 2'-O-methyluridine-3'-phosphate
  modified_base 19: mod_base = OTHER; note = 2'-O-methyladenosine-3'-phosphate
  modified_base 20: mod_base = OTHER; note = 2'-O-methylcytidine-3'-phosphate
  modified_base 21: mod_base = OTHER; note = 2'-O-methyluridine-3'-phosphate ((2S,4R)-1-[29-[[2-(acetylamino)-2-deoxy-beta-D-galactopyra nosyl]oxy]-14,14-bis[[3-[[3-[[5-[[2-(acetylamino)-2-deoxy-b eta-D-galactopyranosyl]oxy]-1-oxopentyl]amino]propyl]amino] -3-oxopropoxy]methyl]-1,12,19,25-tetraoxo-16-oxa-13,20,24-t riazanonacos-1-yl]-4-hydroxy-2-pyrrolidinyl)methyl ester
tcagttccctgaaagactact

SEQ ID NO: 413 - RNA, 23 nt, synthetic construct
  source 1..23: mol_type = other RNA
  modified_base 1: mod_base = OTHER; note = 2'-O-methyladenosine-3'-phosphorothioate
  modified_base 2: mod_base = OTHER; note = 2'-deoxy-2'-fluoroguanosine-3'-phosphorothioate
  modified_base 3: mod_base = OTHER; note = 2'-O-methyluridine-3'-phosphate
  modified_base 4: mod_base = OTHER; note = 2'-O-methyladenosine-3'-phosphate
  modified_base 5: mod_base = OTHER; note = 2'-O-methylguanosine-3'-phosphate
  modified_base 6: mod_base = OTHER; note = 2'-deoxy-2'-fluorouridine-3'-phosphate
  modified_base 7: mod_base = OTHER; note = 2'-O-methylcytidine-3'-phosphate
  modified_base 8: mod_base = OTHER; note = 2'-deoxy-2'-fluorouridine-3'-phosphate
  modified_base 9: mod_base = OTHER; note = 2'-deoxy-2'-fluorouridine-3'-phosphate
  modified_base 10: mod_base = OTHER; note = 2'-O-methyluridine-3'-phosphate
  modified_base 11: mod_base = OTHER; note = 2'-O-methylcytidine-3'-phosphate
  modified_base 12: mod_base = OTHER; note = 2'-O-methyladenosine-3'-phosphate
  modified_base 13: mod_base = OTHER; note = 2'-O-methylguanosine-3'-phosphate
  modified_base 14: mod_base = OTHER; note = 2'-deoxy-2'-fluoroguanosine-3'-phosphate
  modified_base 15: mod_base = OTHER; note = 2'-O-methylguanosine-3'-phosphate
  modified_base 16: mod_base = OTHER; note = 2'-deoxy-2'-fluoroadenosine-3'-phosphate
  modified_base 17: mod_base = OTHER; note = 2'-O-methyladenosine-3'-phosphate
  modified_base 18: mod_base = OTHER; note = 2'-O-methylcytidine-3'-phosphate
  modified_base 19: mod_base = OTHER; note = 2'-O-methyluridine-3'-phosphate
  modified_base 20: mod_base = OTHER; note = 2'-O-methylguanosine-3'-phosphate
  modified_base 21: mod_base = OTHER; note = 2'-O-methyladenosine-3'-phosphorothioate
  modified_base 22: mod_base = OTHER; note = 2'-O-methyladenosine-3'-phosphorothioate
  modified_base 23: mod_base = OTHER; note = 2'-O-methylguanosine
agtagtctttcagggaactgaag

SEQ ID NO: 414 - RNA, 23 nt, synthetic construct
  source 1..23: mol_type = other RNA
cttcagttccctgaaagactact

SEQ ID NO: 415 - RNA, 21 nt, synthetic construct
  source 1..21: mol_type = other RNA
  modified_base 1: mod_base = OTHER; note = 2'-O-methyladenosine-3'-phosphorothioate
  modified_base 2: mod_base = OTHER; note = 2'-O-methylguanosine-3'-phosphorothioate
  modified_base 3: mod_base = OTHER; note = 2'-O-methyladenosine-3'-phosphate
  modified_base 4: mod_base = OTHER; note = 2'-O-methylcytidine-3'-phosphate
  modified_base 5: mod_base = OTHER; note = 2'-O-methyluridine-3'-phosphate
  modified_base 6: mod_base = OTHER; note = 2'-O-methyladenosine-3'-phosphate
  modified_base 7: mod_base = OTHER; note = 2'-deoxy-2'-fluorocytidine-3'-phosphate
  modified_base 8: mod_base = OTHER; note = 2'-O-methyluridine-3'-phosphate
  modified_base 9: mod_base = OTHER; note = 2'-deoxy-2'-fluoroguanosine-3'-phosphate
  modified_base 10: mod_base = OTHER; note = 2'-deoxy-2'-fluoroguanosine-3'-phosphate
  modified_base 11: mod_base = OTHER; note = 2'-deoxy-2'-fluoroadenosine-3'-phosphate
  modified_base 12: mod_base = OTHER; note = 2'-O-methylguanosine-3'-phosphate
  modified_base 13: mod_base = OTHER; note = 2'-O-methylcytidine-3'-phosphate
  modified_base 14: mod_base = OTHER; note = 2'-O-methyladenosine-3'-phosphate
  modified_base 15: mod_base = OTHER; note = 2'-O-methylcytidine-3'-phosphate
  modified_base 16: mod_base = OTHER; note = 2'-O-methylcytidine-3'-phosphate
  modified_base 17: mod_base = OTHER; note = 2'-O-methylguanosine-3'-phosphate
  modified_base 18: mod_base = OTHER; note = 2'-O-methyluridine-3'-phosphate
  modified_base 19: mod_base = OTHER; note = 2'-O-methyluridine-3'-phosphate
  modified_base 20: mod_base = OTHER; note = 2'-O-methyladenosine-3'-phosphate
  modified_base 21: mod_base = OTHER; note = 2'-O-methyluridine-3'-phosphate ((2S,4R)-1-[29-[[2-(acetylamino)-2-deoxy-beta-D-galactopyra nosyl]oxy]-14,14-bis[[3-[[3-[[5-[[2-(acetylamino)-2-deoxy-b eta-D-galactopyranosyl]oxy]-1-oxopentyl]amino]propyl]amino] -3-oxopropoxy]methyl]-1,12,19,25-tetraoxo-16-oxa-13,20,24-t riazanonacos-1-yl]-4-hydroxy-2-pyrrolidinyl)methyl ester
agactactggagcaccgttat

SEQ ID NO: 416 - RNA, 23 nt, synthetic construct
  source 1..23: mol_type = other RNA
  modified_base 1: mod_base = OTHER; note = 2'-O-methyladenosine-3'-phosphorothioate
  modified_base 2: mod_base = OTHER; note = 2'-deoxy-2'-fluorouridine-3'-phosphorothioate
  modified_base 3: mod_base = OTHER; note = 2'-O-methyladenosine-3'-phosphate
  modified_base 4: mod_base = OTHER; note = 2'-O-methyladenosine-3'-phosphate
  modified_base 5: mod_base = OTHER; note = 2'-O-methylcytidine-3'-phosphate
  modified_base 6: mod_base = OTHER; note = 2'-deoxy-2'-fluoroguanosine-3'-phosphate
  modified_base 7: mod_base = OTHER; note = 2'-O-methylguanosine-3'-phosphate
  modified_base 8: mod_base = OTHER; note = 2'-deoxy-2'-fluorouridine-3'-phosphate
  modified_base 9: mod_base = OTHER; note = 2'-deoxy-2'-fluoroguanosine-3'-phosphate
  modified_base 10: mod_base = OTHER; note = 2'-O-methylcytidine-3'-phosphate
  modified_base 11: mod_base = OTHER; note = 2'-O-methyluridine-3'-phosphate
  modified_base 12: mod_base = OTHER; note = 2'-O-methylcytidine-3'-phosphate
  modified_base 13: mod_base = OTHER; note = 2'-O-methylcytidine-3'-phosphate
  modified_base 14: mod_base = OTHER; note = 2'-deoxy-2'-fluoroadenosine-3'-phosphate
  modified_base 15: mod_base = OTHER; note = 2'-O-methylguanosine-3'-phosphate
  modified_base 16: mod_base = OTHER; note = 2'-deoxy-2'-fluorouridine-3'-phosphate
  modified_base 17: mod_base = OTHER; note = 2'-O-methyladenosine-3'-phosphate
  modified_base 18: mod_base = OTHER; note = 2'-O-methylguanosine-3'-phosphate
  modified_base 19: mod_base = OTHER; note = 2'-O-methyluridine-3'-phosphate
  modified_base 20: mod_base = OTHER; note = 2'-O-methylcytidine-3'-phosphate
  modified_base 21: mod_base = OTHER; note = 2'-O-methyluridine-3'-phosphorothioate
  modified_base 22: mod_base = OTHER; note = 2'-O-methyluridine-3'-phosphorothioate
  modified_base 23: mod_base = OTHER; note = 2'-O-methyluridine
ataacggtgctccagtagtcttt

SEQ ID NO: 417 - RNA, 23 nt, synthetic construct
  source 1..23: mol_type = other RNA
aaagactactggagcaccgttaa

SEQ ID NO: 418 - RNA, 21 nt, synthetic construct
  source 1..21: mol_type = other RNA
  modified_base 1: mod_base = OTHER; note = 2'-O-methylcytidine-3'-phosphorothioate
  modified_base 2: mod_base = OTHER; note = 2'-O-methylcytidine-3'-phosphorothioate
  modified_base 3: mod_base = OTHER; note = 2'-O-methyladenosine-3'-phosphate
  modified_base 4: mod_base = OTHER; note = 2'-O-methylcytidine-3'-phosphate
  modified_base 5: mod_base = OTHER; note = 2'-O-methylcytidine-3'-phosphate
  modified_base 6: mod_base = OTHER; note = 2'-O-methyladenosine-3'-phosphate
  modified_base 7: mod_base = OTHER; note = 2'-deoxy-2'-fluoroadenosine-3'-phosphate
  modified_base 8: mod_base = OTHER; note = 2'-O-methylguanosine-3'-phosphate
  modified_base 9: mod_base = OTHER; note = 2'-deoxy-2'-fluoroadenosine-3'-phosphate
  modified_base 10: mod_base = OTHER; note = 2'-deoxy-2'-fluorocytidine-3'-phosphate
  modified_base 11: mod_base = OTHER; note = 2'-deoxy-2'-fluorocytidine-3'-phosphate
  modified_base 12: mod_base = OTHER; note = 2'-O-methylguanosine-3'-phosphate
  modified_base 13: mod_base = OTHER; note = 2'-O-methylcytidine-3'-phosphate
  modified_base 14: mod_base = OTHER; note = 2'-O-methylcytidine-3'-phosphate
  modified_base 15: mod_base = OTHER; note = 2'-O-methyladenosine-3'-phosphate
  modified_base 16: mod_base = OTHER; note = 2'-O-methyladenosine-3'-phosphate
  modified_base 17: mod_base = OTHER; note = 2'-O-methylguanosine-3'-phosphate
  modified_base 18: mod_base = OTHER; note = 2'-O-methylguanosine-3'-phosphate
  modified_base 19: mod_base = OTHER; note = 2'-O-methyladenosine-3'-phosphate
  modified_base 20: mod_base = OTHER; note = 2'-O-methyluridine-3'-phosphate
  modified_base 21: mod_base = OTHER; note = 2'-O-methyluridine-3'-phosphate ((2S,4R)-1-[29-[[2-(acetylamino)-2-deoxy-beta-D-galactopyra nosyl]oxy]-14,14-bis[[3-[[3-[[5-[[2-(acetylamino)-2-deoxy-b eta-D-galactopyranosyl]oxy]-1-oxopentyl]amino]propyl]amino] -3-oxopropoxy]methyl]-1,12,19,25-tetraoxo-16-oxa-13,20,24-t riazanonacos-1-yl]-4-hydroxy-2-pyrrolidinyl)methyl ester
ccaccaagaccgccaaggatt

SEQ ID NO: 419 - RNA, 23 nt, synthetic construct
  source 1..23: mol_type = other RNA
  modified_base 1: mod_base = OTHER; note = 2'-O-methyladenosine-3'-phosphorothioate
  modified_base 2: mod_base = OTHER; note = 2'-deoxy-2'-fluoroadenosine-3'-phosphorothioate
  modified_base 3: mod_base = OTHER; note = 2'-O-methyluridine-3'-phosphate
  modified_base 4: mod_base = OTHER; note = 2'-O-methylcytidine-3'-phosphate
  modified_base 5: mod_base = OTHER; note = 2'-O-methylcytidine-3'-phosphate
  modified_base 6: mod_base = OTHER; note = 2'-deoxy-2'-fluorouridine-3'-phosphate
  modified_base 7: mod_base = OTHER; note = 2'-O-methyluridine-3'-phosphate
  modified_base 8: mod_base = OTHER; note = 2'-deoxy-2'-fluoroguanosine-3'-phosphate
  modified_base 9: mod_base = OTHER; note = 2'-deoxy-2'-fluoroguanosine-3'-phosphate
  modified_base 10: mod_base = OTHER; note = 2'-O-methylcytidine-3'-phosphate
  modified_base 11: mod_base = OTHER; note = 2'-O-methylguanosine-3'-phosphate
  modified_base 12: mod_base = OTHER; note = 2'-O-methylguanosine-3'-phosphate
  modified_base 13: mod_base = OTHER; note = 2'-O-methyluridine-3'-phosphate
  modified_base 14: mod_base = OTHER; note = 2'-deoxy-2'-fluorocytidine-3'-phosphate
  modified_base 15: mod_base = OTHER; note = 2'-O-methyluridine-3'-phosphate
  modified_base 16: mod_base = OTHER; note = 2'-deoxy-2'-fluorouridine-3'-phosphate
  modified_base 17: mod_base = OTHER; note = 2'-O-methylguanosine-3'-phosphate
  modified_base 18: mod_base = OTHER; note = 2'-O-methylguanosine-3'-phosphate
  modified_base 19: mod_base = OTHER; note = 2'-O-methyluridine-3'-phosphate
  modified_base 20: mod_base = OTHER; note = 2'-O-methylguanosine-3'-phosphate
  modified_base 21: mod_base = OTHER; note = 2'-O-methylguanosine-3'-phosphorothioate
  modified_base 22: mod_base = OTHER; note = 2'-O-methylcytidine-3'-phosphorothioate
  modified_base 23: mod_base = OTHER; note = 2'-O-methylguanosine
aatccttggcggtcttggtggcg

SEQ ID NO: 420 - RNA, 23 nt, synthetic construct
  source 1..23: mol_type = other RNA
cgccaccaagaccgccaaggatg

SEQ ID NO: 421 - RNA, 21 nt, synthetic construct
  source 1..21: mol_type = other RNA
  modified_base 1: mod_base = OTHER; note = 2'-O-methyluridine-3'-phosphorothioate
  modified_base 2: mod_base = OTHER; note = 2'-O-methylguanosine-3'-phosphorothioate
  modified_base 3: mod_base = OTHER; note = 2'-O-methyladenosine-3'-phosphate
  modified_base 4: mod_base = OTHER; note = 2'-O-methylcytidine-3'-phosphate
  modified_base 5: mod_base = OTHER; note = 2'-O-methylcytidine-3'-phosphate
  modified_base 6: mod_base = OTHER; note = 2'-O-methylguanosine-3'-phosphate
  modified_base 7: mod_base = OTHER; note = 2'-deoxy-2'-fluoroadenosine-3'-phosphate
  modified_base 8: mod_base = OTHER; note = 2'-O-methyluridine-3'-phosphate
  modified_base 9: mod_base = OTHER; note = 2'-deoxy-2'-fluoroguanosine-3'-phosphate
  modified_base 10: mod_base = OTHER; note = 2'-deoxy-2'-fluoroguanosine-3'-phosphate
  modified_base 11: mod_base = OTHER; note = 2'-deoxy-2'-fluorocytidine-3'-phosphate
  modified_base 12: mod_base = OTHER; note = 2'-O-methyluridine-3'-phosphate
  modified_base 13: mod_base = OTHER; note = 2'-O-methyluridine-3'-phosphate
  modified_base 14: mod_base = OTHER; note = 2'-O-methylcytidine-3'-phosphate
  modified_base 15: mod_base = OTHER; note = 2'-O-methyladenosine-3'-phosphate
  modified_base 16: mod_base = OTHER; note = 2'-O-methylguanosine-3'-phosphate
  modified_base 17: mod_base = OTHER; note = 2'-O-methyluridine-3'-phosphate
  modified_base 18: mod_base = OTHER; note = 2'-O-methyluridine-3'-phosphate
  modified_base 19: mod_base = OTHER; note = 2'-O-methylcytidine-3'-phosphate
  modified_base 20: mod_base = OTHER; note = 2'-O-methylcytidine-3'-phosphate
  modified_base 21: mod_base = OTHER; note = 2'-O-methyluridine-3'-phosphate ((2S,4R)-1-[29-[[2-(acetylamino)-2-deoxy-beta-D-galactopyra nosyl]oxy]-14,14-bis[[3-[[3-[[5-[[2-(acetylamino)-2-deoxy-b eta-D-galactopyranosyl]oxy]-1-oxopentyl]amino]propyl]amino] -3-oxopropoxy]methyl]-1,12,19,25-tetraoxo-16-oxa-13,20,24-t riazanonacos-1-yl]-4-hydroxy-2-pyrrolidinyl)methyl ester
tgaccgatggcttcagttcct

SEQ ID NO: 422 - RNA, 23 nt, synthetic construct
  source 1..23: mol_type = other RNA
  modified_base 1: mod_base = OTHER; note = 2'-O-methyladenosine-3'-phosphorothioate
  modified_base 2: mod_base = OTHER; note = 2'-deoxy-2'-fluoroguanosine-3'-phosphorothioate
  modified_base 3: mod_base = OTHER; note = 2'-O-methylguanosine-3'-phosphate
  modified_base 4: mod_base = OTHER; note = 2'-O-methyladenosine-3'-phosphate
  modified_base 5: mod_base = OTHER; note = 2'-O-methyladenosine-3'-phosphate
  modified_base 6: mod_base = OTHER; note = 2'-deoxy-2'-fluorocytidine-3'-phosphate
  modified_base 7: mod_base = OTHER; note = 2'-O-methyluridine-3'-phosphate
  modified_base 8: mod_base = OTHER; note = 2'-deoxy-2'-fluoroguanosine-3'-phosphate
  modified_base 9: mod_base = OTHER; note = 2'-deoxy-2'-fluoroadenosine-3'-phosphate
  modified_base 10: mod_base = OTHER; note = 2'-O-methyladenosine-3'-phosphate
  modified_base 11: mod_base = OTHER; note = 2'-O-methylguanosine-3'-phosphate
  modified_base 12: mod_base = OTHER; note = 2'-O-methylcytidine-3'-phosphate
  modified_base 13: mod_base = OTHER; note = 2'-O-methylcytidine-3'-phosphate
  modified_base 14: mod_base = OTHER; note = 2'-deoxy-2'-fluoroadenosine-3'-phosphate
  modified_base 15: mod_base = OTHER; note = 2'-O-methyluridine-3'-phosphate
  modified_base 16: mod_base = OTHER; note = 2'-deoxy-2'-fluorocytidine-3'-phosphate
  modified_base 17: mod_base = OTHER; note = 2'-O-methylguanosine-3'-phosphate
  modified_base 18: mod_base = OTHER; note = 2'-O-methylguanosine-3'-phosphate
  modified_base 19: mod_base = OTHER; note = 2'-O-methyluridine-3'-phosphate
  modified_base 20: mod_base = OTHER; note = 2'-O-methylcytidine-3'-phosphate
  modified_base 21: mod_base = OTHER; note = 2'-O-methyladenosine-3'-phosphorothioate
  modified_base 22: mod_base = OTHER; note = 2'-O-methylcytidine-3'-phosphorothioate
  modified_base 23: mod_base = OTHER; note = 2'-O-methylcytidine
aggaactgaagccatcggtcacc

SEQ ID NO: 423 - RNA, 23 nt, synthetic construct
  source 1..23: mol_type = other RNA
ggtgaccgatggcttcagttccc

SEQ ID NO: 424 - RNA, 21 nt, synthetic construct
  source 1..21: mol_type = other RNA
  modified_base 1: mod_base = OTHER; note = 2'-O-methylcytidine-3'-phosphorothioate
  modified_base 2: mod_base = OTHER; note = 2'-O-methyluridine-3'-phosphorothioate
  modified_base 3: mod_base = OTHER; note = 2'-O-methylguanosine-3'-phosphate
  modified_base 4: mod_base = OTHER; note = 2'-O-methylguanosine-3'-phosphate
  modified_base 5: mod_base = OTHER; note = 2'-O-methylguanosine-3'-phosphate
  modified_base 6: mod_base = OTHER; note = 2'-O-methyluridine-3'-phosphate
  modified_base 7: mod_base = OTHER; note = 2'-deoxy-2'-fluoroguanosine-3'-phosphate
  modified_base 8: mod_base = OTHER; note = 2'-O-methyladenosine-3'-phosphate
  modified_base 9: mod_base = OTHER; note = 2'-deoxy-2'-fluorocytidine-3'-phosphate
  modified_base 10: mod_base = OTHER; note = 2'-deoxy-2'-fluorocytidine-3'-phosphate
  modified_base 11: mod_base = OTHER; note = 2'-deoxy-2'-fluoroguanosine-3'-phosphate
  modified_base 12: mod_base = OTHER; note = 2'-O-methyladenosine-3'-phosphate
  modified_base 13: mod_base = OTHER; note = 2'-O-methyluridine-3'-phosphate
  modified_base 14: mod_base = OTHER; note = 2'-O-methylguanosine-3'-phosphate
  modified_base 15: mod_base = OTHER; note = 2'-O-methylguanosine-3'-phosphate
  modified_base 16: mod_base = OTHER; note = 2'-O-methylcytidine-3'-phosphate
  modified_base 17: mod_base = OTHER; note = 2'-O-methyluridine-3'-phosphate
  modified_base 18: mod_base = OTHER; note = 2'-O-methyluridine-3'-phosphate
  modified_base 19: mod_base = OTHER; note = 2'-O-methylcytidine-3'-phosphate
  modified_base 20: mod_base = OTHER; note = 2'-O-methyladenosine-3'-phosphate
  modified_base 21: mod_base = OTHER; note = 2'-O-methyluridine-3'-phosphate ((2S,4R)-1-[29-[[2-(acetylamino)-2-deoxy-beta-D-galactopyra nosyl]oxy]-14,14-bis[[3-[[3-[[5-[[2-(acetylamino)-2-deoxy-b eta-D-galactopyranosyl]oxy]-1-oxopentyl]amino]propyl]amino] -3-oxopropoxy]methyl]-1,12,19,25-tetraoxo-16-oxa-13,20,24-t riazanonacos-1-yl]-4-hydroxy-2-pyrrolidinyl)methyl ester
ctgggtgaccgatggcttcat

SEQ ID NO: 425 - RNA, 23 nt, synthetic construct
  source 1..23: mol_type = other RNA
  modified_base 1: mod_base = OTHER; note = 2'-O-methyladenosine-3'-phosphorothioate
  modified_base 2: mod_base = OTHER; note = 2'-deoxy-2'-fluorouridine-3'-phosphorothioate
  modified_base 3: mod_base = OTHER; note = 2'-O-methylguanosine-3'-phosphate
  modified_base 4: mod_base = OTHER; note = 2'-O-methyladenosine-3'-phosphate
  modified_base 5: mod_base = OTHER; note = 2'-O-methyladenosine-3'-phosphate
  modified_base 6: mod_base = OTHER; note = 2'-deoxy-2'-fluoroguanosine-3'-phosphate
  modified_base 7: mod_base = OTHER; note = 2'-O-methylcytidine-3'-phosphate
  modified_base 8: mod_base = OTHER; note = 2'-deoxy-2'-fluorocytidine-3'-phosphate
  modified_base 9: mod_base = OTHER; note = 2'-deoxy-2'-fluoroadenosine-3'-phosphate
  modified_base 10: mod_base = OTHER; note = 2'-O-methyluridine-3'-phosphate
  modified_base 11: mod_base = OTHER; note = 2'-O-methylcytidine-3'-phosphate
  modified_base 12: mod_base = OTHER; note = 2'-O-methylguanosine-3'-phosphate
  modified_base 13: mod_base = OTHER; note = 2'-O-methylguanosine-3'-phosphate
  modified_base 14: mod_base = OTHER; note = 2'-deoxy-2'-fluorouridine-3'-phosphate
  modified_base 15: mod_base = OTHER; note = 2'-O-methylcytidine-3'-phosphate
  modified_base 16: mod_base = OTHER; note = 2'-deoxy-2'-fluoroadenosine-3'-phosphate
  modified_base 17: mod_base = OTHER; note = 2'-O-methylcytidine-3'-phosphate
  modified_base 18: mod_base = OTHER; note = 2'-O-methylcytidine-3'-phosphate
  modified_base 19: mod_base = OTHER; note = 2'-O-methylcytidine-3'-phosphate
  modified_base 20: mod_base = OTHER; note = 2'-O-methyladenosine-3'-phosphate
  modified_base 21: mod_base = OTHER; note = 2'-O-methylguanosine-3'-phosphorothioate
  modified_base 22: mod_base = OTHER; note = 2'-O-methylcytidine-3'-phosphorothioate
  modified_base 23: mod_base = OTHER; note = 2'-O-methylcytidine
atgaagccatcggtcacccagcc

SEQ ID NO: 426 - RNA, 23 nt, synthetic construct
  source 1..23: mol_type = other RNA
ggctgggtgaccgatggcttcag

SEQ ID NO: 427 - RNA, 21 nt, synthetic construct
  source 1..21: mol_type = other RNA
  modified_base 1: mod_base = OTHER; note = 2'-O-methylcytidine-3'-phosphorothioate
  modified_base 2: mod_base = OTHER; note = 2'-O-methyladenosine-3'-phosphorothioate
  modified_base 3: mod_base = OTHER; note = 2'-O-methyladenosine-3'-phosphate
  modified_base 4: mod_base = OTHER; note = 2'-O-methyluridine-3'-phosphate
  modified_base 5: mod_base = OTHER; note = 2'-O-methyladenosine-3'-phosphate
  modified_base 6: mod_base = OTHER; note = 2'-O-methyladenosine-3'-phosphate
  modified_base 7: mod_base = OTHER; note = 2'-deoxy-2'-fluoroadenosine-3'-phosphate
  modified_base 8: mod_base = OTHER; note = 2'-O-methylguanosine-3'-phosphate
  modified_base 9: mod_base = OTHER; note = 2'-deoxy-2'-fluorocytidine-3'-phosphate
  modified_base 10: mod_base = OTHER; note = 2'-deoxy-2'-fluorouridine-3'-phosphate
  modified_base 11: mod_base = OTHER; note = 2'-deoxy-2'-fluoroguanosine-3'-phosphate
  modified_base 12: mod_base = OTHER; note = 2'-O-methylguanosine-3'-phosphate
  modified_base 13: mod_base = OTHER; note = 2'-O-methyladenosine-3'-phosphate
  modified_base 14: mod_base = OTHER; note = 2'-O-methylcytidine-3'-phosphate
  modified_base 15: mod_base = OTHER; note = 2'-O-methyladenosine-3'-phosphate
  modified_base 16: mod_base = OTHER; note = 2'-O-methyladenosine-3'-phosphate
  modified_base 17: mod_base = OTHER; note = 2'-O-methylguanosine-3'-phosphate
  modified_base 18: mod_base = OTHER; note = 2'-O-methyladenosine-3'-phosphate
  modified_base 19: mod_base = OTHER; note = 2'-O-methyladenosine-3'-phosphate
  modified_base 20: mod_base = OTHER; note = 2'-O-methylguanosine-3'-phosphate
  modified_base 21: mod_base = OTHER; note = 2'-O-methyluridine-3'-phosphate ((2S,4R)-1-[29-[[2-(acetylamino)-2-deoxy-beta-D-galactopyra nosyl]oxy]-14,14-bis[[3-[[3-[[5-[[2-(acetylamino)-2-deoxy-b eta-D-galactopyranosyl]oxy]-1-oxopentyl]amino]propyl]amino] -3-oxopropoxy]methyl]-1,12,19,25-tetraoxo-16-oxa-13,20,24-t riazanonacos-1-yl]-4-hydroxy-2-pyrrolidinyl)methyl ester
caataaagctggacaagaagt

SEQ ID NO: 428 - RNA, 23 nt, synthetic construct
  source 1..23: mol_type = other RNA
  modified_base 1: mod_base = OTHER; note = 2'-O-methyladenosine-3'-phosphorothioate
  modified_base 2: mod_base = OTHER; note = 2'-deoxy-2'-fluorocytidine-3'-phosphorothioate
  modified_base 3: mod_base = OTHER; note = 2'-O-methyluridine-3'-phosphate
  modified_base 4: mod_base = OTHER; note = 2'-O-methyluridine-3'-phosphate
  modified_base 5: mod_base = OTHER; note = 2'-O-methylcytidine-3'-phosphate
  modified_base 6: mod_base = OTHER; note = 2'-deoxy-2'-fluorouridine-3'-phosphate
  modified_base 7: mod_base = OTHER; note = 2'-O-methyluridine-3'-phosphate
  modified_base 8: mod_base = OTHER; note = 2'-deoxy-2'-fluoroguanosine-3'-phosphate
  modified_base 9: mod_base = OTHER; note = 2'-deoxy-2'-fluorouridine-3'-phosphate
  modified_base 10: mod_base = OTHER; note = 2'-O-methylcytidine-3'-phosphate
  modified_base 11: mod_base = OTHER; note = 2'-O-methylcytidine-3'-phosphate
  modified_base 12: mod_base = OTHER; note = 2'-O-methyladenosine-3'-phosphate
  modified_base 13: mod_base = OTHER; note = 2'-O-methylguanosine-3'-phosphate
  modified_base 14: mod_base = OTHER; note = 2'-deoxy-2'-fluorocytidine-3'-phosphate
  modified_base 15: mod_base = OTHER; note = 2'-O-methyluridine-3'-phosphate
  modified_base 16: mod_base = OTHER; note = 2'-deoxy-2'-fluorouridine-3'-phosphate
  modified_base 17: mod_base = OTHER; note = 2'-O-methyluridine-3'-phosphate
  modified_base 18: mod_base = OTHER; note = 2'-O-methyladenosine-3'-phosphate
  modified_base 19: mod_base = OTHER; note = 2'-O-methyluridine-3'-phosphate
  modified_base 20: mod_base = OTHER; note = 2'-O-methyluridine-3'-phosphate
  modified_base 21: mod_base = OTHER; note = 2'-O-methylguanosine-3'-phosphorothioate
  modified_base 22: mod_base = OTHER; note = 2'-O-methylguanosine-3'-phosphorothioate
  modified_base 23: mod_base = OTHER; note = 2'-O-methylguanosine
acttcttgtccagctttattggg

SEQ ID NO: 429 - RNA, 23 nt, synthetic construct
  source 1..23: mol_type = other RNA
cccaataaagctggacaagaagc

SEQ ID NO: 430 - RNA, 21 nt, synthetic construct
  source 1..21: mol_type = other RNA
  modified_base 1: mod_base = OTHER; note = 2'-O-methylcytidine-3'-phosphorothioate
  modified_base 2: mod_base = OTHER; note = 2'-O-methylguanosine-3'-phosphorothioate
  modified_base 3: mod_base = OTHER; note = 2'-O-methyladenosine-3'-phosphate
  modified_base 4: mod_base = OTHER; note = 2'-O-methyluridine-3'-phosphate
  modified_base 5: mod_base = OTHER; note = 2'-O-methylguanosine-3'-phosphate
  modified_base 6: mod_base = OTHER; note = 2'-O-methylguanosine-3'-phosphate
  modified_base 7: mod_base = OTHER; note = 2'-deoxy-2'-fluorocytidine-3'-phosphate
  modified_base 8: mod_base = OTHER; note = 2'-O-methyluridine-3'-phosphate
  modified_base 9: mod_base = OTHER; note = 2'-deoxy-2'-fluorouridine-3'-phosphate
  modified_base 10: mod_base = OTHER; note = 2'-deoxy-2'-fluorocytidine-3'-phosphate
  modified_base 11: mod_base = OTHER; note = 2'-deoxy-2'-fluoroadenosine-3'-phosphate
  modified_base 12: mod_base = OTHER; note = 2'-O-methylguanosine-3'-phosphate
  modified_base 13: mod_base = OTHER; note = 2'-O-methyluridine-3'-phosphate
  modified_base 14: mod_base = OTHER; note = 2'-O-methyluridine-3'-phosphate
  modified_base 15: mod_base = OTHER; note = 2'-O-methylcytidine-3'-phosphate
  modified_base 16: mod_base = OTHER; note = 2'-O-methylcytidine-3'-phosphate
  modified_base 17: mod_base = OTHER; note = 2'-O-methylcytidine-3'-phosphate
  modified_base 18: mod_base = OTHER; note = 2'-O-methyluridine-3'-phosphate
  modified_base 19: mod_base = OTHER; note = 2'-O-methylguanosine-3'-phosphate
  modified_base 20: mod_base = OTHER; note = 2'-O-methyladenosine-3'-phosphate
  modified_base 21: mod_base = OTHER; note = 2'-O-methyluridine-3'-phosphate ((2S,4R)-1-[29-[[2-(acetylamino)-2-deoxy-beta-D-galactopyra nosyl]oxy]-14,14-bis[[3-[[3-[[5-[[2-(acetylamino)-2-deoxy-b eta-D-galactopyranosyl]oxy]-1-oxopentyl]amino]propyl]amino] -3-oxopropoxy]methyl]-1,12,19,25-tetraoxo-16-oxa-13,20,24-t riazanonacos-1-yl]-4-hydroxy-2-pyrrolidinyl)methyl ester
cgatggcttcagttccctgat

SEQ ID NO: 431 - RNA, 23 nt, synthetic construct
  source 1..23: mol_type = other RNA
  modified_base 1: mod_base = OTHER; note = 2'-O-methyladenosine-3'-phosphorothioate
  modified_base 2: mod_base = OTHER; note = 2'-deoxy-2'-fluorouridine-3'-phosphorothioate
  modified_base 3: mod_base = OTHER; note = 2'-O-methylcytidine-3'-phosphate
  modified_base 4: mod_base = OTHER; note = 2'-O-methyladenosine-3'-phosphate
  modified_base 5: mod_base = OTHER; note = 2'-O-methylguanosine-3'-phosphate
  modified_base 6: mod_base = OTHER; note = 2'-deoxy-2'-fluoroguanosine-3'-phosphate
  modified_base 7: mod_base = OTHER; note = 2'-O-methylguanosine-3'-phosphate
  modified_base 8: mod_base = OTHER; note = 2'-deoxy-2'-fluoroadenosine-3'-phosphate
  modified_base 9: mod_base = OTHER; note = 2'-deoxy-2'-fluoroadenosine-3'-phosphate
  modified_base 10: mod_base = OTHER; note = 2'-O-methylcytidine-3'-phosphate
  modified_base 11: mod_base = OTHER; note = 2'-O-methyluridine-3'-phosphate
  modified_base 12: mod_base = OTHER; note = 2'-O-methylguanosine-3'-phosphate
  modified_base 13: mod_base = OTHER; note = 2'-O-methyladenosine-3'-phosphate
  modified_base 14: mod_base = OTHER; note = 2'-deoxy-2'-fluoroadenosine-3'-phosphate
  modified_base 15: mod_base = OTHER; note = 2'-O-methylguanosine-3'-phosphate
  modified_base 16: mod_base = OTHER; note = 2'-deoxy-2'-fluorocytidine-3'-phosphate
  modified_base 17: mod_base = OTHER; note = 2'-O-methylcytidine-3'-phosphate
  modified_base 18: mod_base = OTHER; note = 2'-O-methyladenosine-3'-phosphate
  modified_base 19: mod_base = OTHER; note = 2'-O-methyluridine-3'-phosphate
  modified_base 20: mod_base = OTHER; note = 2'-O-methylcytidine-3'-phosphate
  modified_base 21: mod_base = OTHER; note = 2'-O-methylguanosine-3'-phosphorothioate
  modified_base 22: mod_base = OTHER; note = 2'-O-methylguanosine-3'-phosphorothioate
  modified_base 23: mod_base = OTHER; note = 2'-O-methyluridine
atcagggaactgaagccatcggt

SEQ ID NO: 432 - RNA, 23 nt, synthetic construct
  source 1..23: mol_type = other RNA
accgatggcttcagttccctgaa

SEQ ID NO: 433 - RNA, 21 nt, synthetic construct
  source 1..21: mol_type = other RNA
  modified_base 1: mod_base = OTHER; note = 2'-O-methyladenosine-3'-phosphorothioate
  modified_base 2: mod_base = OTHER; note = 2'-O-methylguanosine-3'-phosphorothioate
  modified_base 3: mod_base = OTHER; note = 2'-O-methylguanosine-3'-phosphate
  modified_base 4: mod_base = OTHER; note = 2'-O-methylguanosine-3'-phosphate
  modified_base 5: mod_base = OTHER; note = 2'-O-methyladenosine-3'-phosphate
  modified_base 6: mod_base = OTHER; note = 2'-O-methylcytidine-3'-phosphate
  modified_base 7: mod_base = OTHER; note = 2'-deoxy-2'-fluoroadenosine-3'-phosphate
  modified_base 8: mod_base = OTHER; note = 2'-O-methylguanosine-3'-phosphate
  modified_base 9: mod_base = OTHER; note = 2'-deoxy-2'-fluorouridine-3'-phosphate
  modified_base 10: mod_base = OTHER; note = 2'-deoxy-2'-fluoroadenosine-3'-phosphate
  modified_base 11: mod_base = OTHER; note = 2'-deoxy-2'-fluorouridine-3'-phosphate
  modified_base 12: mod_base = OTHER; note = 2'-O-methyluridine-3'-phosphate
  modified_base 13: mod_base = OTHER; note = 2'-O-methylcytidine-3'-phosphate
  modified_base 14: mod_base = OTHER; note = 2'-O-methyluridine-3'-phosphate
  modified_base 15: mod_base = OTHER; note = 2'-O-methylcytidine-3'-phosphate
  modified_base 16: mod_base = OTHER; note = 2'-O-methyladenosine-3'-phosphate
  modified_base 17: mod_base = OTHER; note = 2'-O-methylguanosine-3'-phosphate
  modified_base 18: mod_base = OTHER; note = 2'-O-methyluridine-3'-phosphate
  modified_base 19: mod_base = OTHER; note = 2'-O-methylguanosine-3'-phosphate
  modified_base 20: mod_base = OTHER; note = 2'-O-methylcytidine-3'-phosphate
  modified_base 21: mod_base = OTHER; note = 2'-O-methyluridine-3'-phosphate ((2S,4R)-1-[29-[[2-(acetylamino)-2-deoxy-beta-D-galactopyra nosyl]oxy]-14,14-bis[[3-[[3-[[5-[[2-(acetylamino)-2-deoxy-b eta-D-galactopyranosyl]oxy]-1-oxopentyl]amino]propyl]amino] -3-oxopropoxy]methyl]-1,12,19,25-tetraoxo-16-oxa-13,20,24-t riazanonacos-1-yl]-4-hydroxy-2-pyrrolidinyl)methyl ester
agggacagtattctcagtgct

SEQ ID NO: 434 - RNA, 23 nt, synthetic construct
  source 1..23: mol_type = other RNA
  modified_base 1: mod_base = OTHER; note = 2'-O-methyladenosine-3'-phosphorothioate
  modified_base 2: mod_base = OTHER; note = 2'-deoxy-2'-fluoroguanosine-3'-phosphorothioate
  modified_base 3: mod_base = OTHER; note = 2'-O-methylcytidine-3'-phosphate
  modified_base 4: mod_base = OTHER; note = 2'-O-methyladenosine-3'-phosphate
  modified_base 5: mod_base = OTHER; note = 2'-O-methylcytidine-3'-phosphate
  modified_base 6: mod_base = OTHER; note = 2'-deoxy-2'-fluorouridine-3'-phosphate
  modified_base 7: mod_base = OTHER; note = 2'-O-methylguanosine-3'-phosphate
  modified_base 8: mod_base = OTHER; note = 2'-deoxy-2'-fluoroadenosine-3'-phosphate
  modified_base 9: mod_base = OTHER; note = 2'-deoxy-2'-fluoroguanosine-3'-phosphate
  modified_base 10: mod_base = OTHER; note = 2'-O-methyladenosine-3'-phosphate
  modified_base 11: mod_base = OTHER; note = 2'-O-methyladenosine-3'-phosphate
  modified_base 12: mod_base = OTHER; note = 2'-O-methyluridine-3'-phosphate
  modified_base 13: mod_base = OTHER; note = 2'-O-methyladenosine-3'-phosphate
  modified_base 14: mod_base = OTHER; note = 2'-deoxy-2'-fluorocytidine-3'-phosphate
  modified_base 15: mod_base = OTHER; note = 2'-O-methyluridine-3'-phosphate
  modified_base 16: mod_base = OTHER; note = 2'-deoxy-2'-fluoroguanosine-3'-phosphate
  modified_base 17: mod_base = OTHER; note = 2'-O-methyluridine-3'-phosphate
  modified_base 18: mod_base = OTHER; note = 2'-O-methylcytidine-3'-phosphate
  modified_base 19: mod_base = OTHER; note = 2'-O-methylcytidine-3'-phosphate
  modified_base 20: mod_base = OTHER; note = 2'-O-methylcytidine-3'-phosphate
  modified_base 21: mod_base = OTHER; note = 2'-O-methyluridine-3'-phosphorothioate
  modified_base 22: mod_base = OTHER; note = 2'-O-methyluridine-3'-phosphorothioate
  modified_base 23: mod_base = OTHER; note = 2'-O-methyluridine
agcactgagaatactgtcccttt

SEQ ID NO: 435 - RNA, 23 nt, synthetic construct
  source 1..23: mol_type = other RNA
aaagggacagtattctcagtgct

SEQ ID NO: 436 - RNA, 21 nt, synthetic construct
  source 1..21: mol_type = other RNA
  modified_base 1: mod_base = OTHER; note = 2'-O-methylcytidine-3'-phosphorothioate
  modified_base 2: mod_base = OTHER; note = 2'-O-methyluridine-3'-phosphorothioate
  modified_base 3: mod_base = OTHER; note = 2'-O-methylguanosine-3'-phosphate
  modified_base 4: mod_base = OTHER; note = 2'-O-methyladenosine-3'-phosphate
  modified_base 5: mod_base = OTHER; note = 2'-O-methyladenosine-3'-phosphate
  modified_base 6: mod_base = OTHER; note = 2'-O-methyladenosine-3'-phosphate
  modified_base 7: mod_base = OTHER; note = 2'-deoxy-2'-fluoroguanosine-3'-phosphate
  modified_base 8: mod_base = OTHER; note = 2'-O-methyladenosine-3'-phosphate
  modified_base 9: mod_base = OTHER; note = 2'-deoxy-2'-fluorocytidine-3'-phosphate
  modified_base 10: mod_base = OTHER; note = 2'-deoxy-2'-fluorouridine-3'-phosphate
  modified_base 11: mod_base = OTHER; note = 2'-deoxy-2'-fluoroadenosine-3'-phosphate
  modified_base 12: mod_base = OTHER; note = 2'-O-methylcytidine-3'-phosphate
  modified_base 13: mod_base = OTHER; note = 2'-O-methyluridine-3'-phosphate
  modified_base 14: mod_base = OTHER; note = 2'-O-methylguanosine-3'-phosphate
  modified_base 15: mod_base = OTHER; note = 2'-O-methylguanosine-3'-phosphate
  modified_base 16: mod_base = OTHER; note = 2'-O-methyladenosine-3'-phosphate
  modified_base 17: mod_base = OTHER; note = 2'-O-methylguanosine-3'-phosphate
  modified_base 18: mod_base = OTHER; note = 2'-O-methylcytidine-3'-phosphate
  modified_base 19: mod_base = OTHER; note = 2'-O-methyladenosine-3'-phosphate
  modified_base 20: mod_base = OTHER; note = 2'-O-methylcytidine-3'-phosphate
  modified_base 21: mod_base = OTHER; note = 2'-O-methyluridine-3'-phosphate ((2S,4R)-1-[29-[[2-(acetylamino)-2-deoxy-beta-D-galactopyra nosyl]oxy]-14,14-bis[[3-[[3-[[5-[[2-(acetylamino)-2-deoxy-b eta-D-galactopyranosyl]oxy]-1-oxopentyl]amino]propyl]amino] -3-oxopropoxy]methyl]-1,12,19,25-tetraoxo-16-oxa-13,20,24-t riazanonacos-1-yl]-4-hydroxy-2-pyrrolidinyl)methyl ester
ctgaaagactactggagcact

SEQ ID NO: 437 - RNA, 23 nt, synthetic construct
  source 1..23: mol_type = other RNA
  modified_base 1: mod_base = OTHER; note = 2'-O-methyladenosine-3'-phosphorothioate
  modified_base 2: mod_base = OTHER; note = 2'-deoxy-2'-fluoroguanosine-3'-phosphorothioate
  modified_base 3: mod_base = OTHER; note = 2'-O-methyluridine-3'-phosphate
  modified_base 4: mod_base = OTHER; note = 2'-O-methylguanosine-3'-phosphate
  modified_base 5: mod_base = OTHER; note = 2'-O-methylcytidine-3'-phosphate
  modified_base 6: mod_base = OTHER; note = 2'-deoxy-2'-fluorouridine-3'-phosphate
  modified_base 7: mod_base = OTHER; note = 2'-O-methylcytidine-3'-phosphate
  modified_base 8: mod_base = OTHER; note = 2'-deoxy-2'-fluorocytidine-3'-phosphate
  modified_base 9: mod_base = OTHER; note = 2'-deoxy-2'-fluoroadenosine-3'-phosphate
  modified_base 10: mod_base = OTHER; note = 2'-O-methylguanosine-3'-phosphate
  modified_base 11: mod_base = OTHER; note = 2'-O-methyluridine-3'-phosphate
  modified_base 12: mod_base = OTHER; note = 2'-O-methyladenosine-3'-phosphate
  modified_base 13: mod_base = OTHER; note = 2'-O-methylguanosine-3'-phosphate
  modified_base 14: mod_base = OTHER; note = 2'-deoxy-2'-fluorouridine-3'-phosphate
  modified_base 15: mod_base = OTHER; note = 2'-O-methylcytidine-3'-phosphate
  modified_base 16: mod_base = OTHER; note = 2'-deoxy-2'-fluorouridine-3'-phosphate
  modified_base 17: mod_base = OTHER; note = 2'-O-methyluridine-3'-phosphate
  modified_base 18: mod_base = OTHER; note = 2'-O-methyluridine-3'-phosphate
  modified_base 19: mod_base = OTHER; note = 2'-O-methylcytidine-3'-phosphate
  modified_base 20: mod_base = OTHER; note = 2'-O-methyladenosine-3'-phosphate
  modified_base 21: mod_base = OTHER; note = 2'-O-methylguanosine-3'-phosphorothioate
  modified_base 22: mod_base = OTHER; note = 2'-O-methylguanosine-3'-phosphorothioate
  modified_base 23: mod_base = OTHER; note = 2'-O-methylguanosine
agtgctccagtagtctttcaggg

SEQ ID NO: 438 - RNA, 23 nt, synthetic construct
  source 1..23: mol_type = other RNA
ccctgaaagactactggagcacc

SEQ ID NO: 439 - RNA, 21 nt, synthetic construct
  source 1..21: mol_type = other RNA
  modified_base 1: mod_base = OTHER; note = 2'-O-methyladenosine-3'-phosphorothioate
  modified_base 2: mod_base = OTHER; note = 2'-O-methyluridine-3'-phosphorothioate
  modified_base 3: mod_base = OTHER; note = 2'-O-methyladenosine-3'-phosphate
  modified_base 4: mod_base = OTHER; note = 2'-O-methyladenosine-3'-phosphate
  modified_base 5: mod_base = OTHER; note = 2'-O-methyladenosine-3'-phosphate
  modified_base 6: mod_base = OTHER; note = 2'-O-methylguanosine-3'-phosphate
  modified_base 7: mod_base = OTHER; note = 2'-deoxy-2'-fluorocytidine-3'-phosphate
  modified_base 8: mod_base = OTHER; note = 2'-O-methyluridine-3'-phosphate
  modified_base 9: mod_base = OTHER; note = 2'-deoxy-2'-fluoroguanosine-3'-phosphate
  modified_base 10: mod_base = OTHER; note = 2'-deoxy-2'-fluoroguanosine-3'-phosphate
  modified_base 11: mod_base = OTHER; note = 2'-deoxy-2'-fluoroadenosine-3'-phosphate
  modified_base 12: mod_base = OTHER; note = 2'-O-methylcytidine-3'-phosphate
  modified_base 13: mod_base = OTHER; note = 2'-O-methyladenosine-3'-phosphate
  modified_base 14: mod_base = OTHER; note = 2'-O-methyladenosine-3'-phosphate
  modified_base 15: mod_base = OTHER; note = 2'-O-methylguanosine-3'-phosphate
  modified_base 16: mod_base = OTHER; note = 2'-O-methyladenosine-3'-phosphate
  modified_base 17: mod_base = OTHER; note = 2'-O-methyladenosine-3'-phosphate
  modified_base 18: mod_base = OTHER; note = 2'-O-methylguanosine-3'-phosphate
  modified_base 19: mod_base = OTHER; note = 2'-O-methylcytidine-3'-phosphate
  modified_base 20: mod_base = OTHER; note = 2'-O-methyluridine-3'-phosphate
  modified_base 21: mod_base = OTHER; note = 2'-O-methyluridine-3'-phosphate ((2S,4R)-1-[29-[[2-(acetylamino)-2-deoxy-beta-D-galactopyra nosyl]oxy]-14,14-bis[[3-[[3-[[5-[[2-(acetylamino)-2-deoxy-b eta-D-galactopyranosyl]oxy]-1-oxopentyl]amino]propyl]amino] -3-oxopropoxy]methyl]-1,12,19,25-tetraoxo-16-oxa-13,20,24-t riazanonacos-1-yl]-4-hydroxy-2-pyrrolidinyl)methyl ester
ataaagctggacaagaagctt

SEQ ID NO: 440 - RNA, 23 nt, synthetic construct
  source 1..23: mol_type = other RNA
  modified_base 1: mod_base = OTHER; note = 2'-O-methyladenosine-3'-phosphorothioate
  modified_base 2: mod_base = OTHER; note = 2'-deoxy-2'-fluoroadenosine-3'-phosphorothioate
  modified_base 3: mod_base = OTHER; note = 2'-O-methylguanosine-3'-phosphate
  modified_base 4: mod_base = OTHER; note = 2'-O-methylcytidine-3'-phosphate
  modified_base 5: mod_base = OTHER; note = 2'-O-methyluridine-3'-phosphate
  modified_base 6: mod_base = OTHER; note = 2'-deoxy-2'-fluorouridine-3'-phosphate
  modified_base 7: mod_base = OTHER; note = 2'-O-methylcytidine-3'-phosphate
  modified_base 8: mod_base = OTHER; note = 2'-deoxy-2'-fluorouridine-3'-phosphate
  modified_base 9: mod_base = OTHER; note = 2'-deoxy-2'-fluorouridine-3'-phosphate
  modified_base 10: mod_base = OTHER; note = 2'-O-methylguanosine-3'-phosphate
  modified_base 11: mod_base = OTHER; note = 2'-O-methyluridine-3'-phosphate
  modified_base 12: mod_base = OTHER; note = 2'-O-methylcytidine-3'-phosphate
  modified_base 13: mod_base = OTHER; note = 2'-O-methylcytidine-3'-phosphate
  modified_base 14: mod_base = OTHER; note = 2'-deoxy-2'-fluoroadenosine-3'-phosphate
  modified_base 15: mod_base = OTHER; note = 2'-O-methylguanosine-3'-phosphate
  modified_base 16: mod_base = OTHER; note = 2'-deoxy-2'-fluorocytidine-3'-phosphate
  modified_base 17: mod_base = OTHER; note = 2'-O-methyluridine-3'-phosphate
  modified_base 18: mod_base = OTHER; note = 2'-O-methyluridine-3'-phosphate
  modified_base 19: mod_base = OTHER; note = 2'-O-methyluridine-3'-phosphate
  modified_base 20: mod_base = OTHER; note = 2'-O-methyladenosine-3'-phosphate
  modified_base 21: mod_base = OTHER; note = 2'-O-methyluridine-3'-phosphorothioate
  modified_base 22: mod_base = OTHER; note = 2'-O-methyluridine-3'-phosphorothioate
  modified_base 23: mod_base = OTHER; note = 2'-O-methylguanosine
aagcttcttgtccagctttattg

SEQ ID NO: 441 - RNA, 23 nt, synthetic construct
  source 1..23: mol_type = other RNA
caataaagctggacaagaagctg

SEQ ID NO: 442 - RNA, 21 nt, synthetic construct
  source 1..21: mol_type = other RNA
  modified_base 1: mod_base = OTHER; note = 2'-O-methyladenosine-3'-phosphorothioate
  modified_base 2: mod_base = OTHER; note = 2'-O-methyladenosine-3'-phosphorothioate
  modified_base 3: mod_base = OTHER; note = 2'-O-methylguanosine-3'-phosphate
  modified_base 4: mod_base = OTHER; note = 2'-O-methyladenosine-3'-phosphate
  modified_base 5: mod_base = OTHER; note = 2'-O-methylcytidine-3'-phosphate
  modified_base 6: mod_base = OTHER; note = 2'-O-methyluridine-3'-phosphate
  modified_base 7: mod_base = OTHER; note = 2'-deoxy-2'-fluoroadenosine-3'-phosphate
  modified_base 8: mod_base = OTHER; note = 2'-O-methylcytidine-3'-phosphate
  modified_base 9: mod_base = OTHER; note = 2'-deoxy-2'-fluorouridine-3'-phosphate
  modified_base 10: mod_base = OTHER; note = 2'-deoxy-2'-fluoroguanosine-3'-phosphate
  modified_base 11: mod_base = OTHER; note = 2'-deoxy-2'-fluoroguanosine-3'-phosphate
  modified_base 12: mod_base = OTHER; note = 2'-O-methyladenosine-3'-phosphate
  modified_base 13: mod_base = OTHER; note = 2'-O-methylguanosine-3'-phosphate
  modified_base 14: mod_base = OTHER; note = 2'-O-methylcytidine-3'-phosphate
  modified_base 15: mod_base = OTHER; note = 2'-O-methyladenosine-3'-phosphate
  modified_base 16: mod_base = OTHER; note = 2'-O-methylcytidine-3'-phosphate
  modified_base 17: mod_base = OTHER; note = 2'-O-methylcytidine-3'-phosphate
  modified_base 18: mod_base = OTHER; note = 2'-O-methylguanosine-3'-phosphate
  modified_base 19: mod_base = OTHER; note = 2'-O-methyluridine-3'-phosphate
  modified_base 20: mod_base = OTHER; note = 2'-O-methyluridine-3'-phosphate
  modified_base 21: mod_base = OTHER; note = 2'-O-methyluridine-3'-phosphate ((2S,4R)-1-[29-[[2-(acetylamino)-2-deoxy-beta-D-galactopyra nosyl]oxy]-14,14-bis[[3-[[3-[[5-[[2-(acetylamino)-2-deoxy-b eta-D-galactopyranosyl]oxy]-1-oxopentyl]amino]propyl]amino] -3-oxopropoxy]methyl]-1,12,19,25-tetraoxo-16-oxa-13,20,24-t riazanonacos-1-yl]-4-hydroxy-2-pyrrolidinyl)methyl ester
aagactactggagcaccgttt

SEQ ID NO: 443 - RNA, 23 nt, synthetic construct
  source 1..23: mol_type = other RNA
  modified_base 1: mod_base = OTHER; note = 2'-O-methyladenosine-3'-phosphorothioate
  modified_base 2: mod_base = OTHER; note = 2'-deoxy-2'-fluoroadenosine-3'-phosphorothioate
  modified_base 3: mod_base = OTHER; note = 2'-O-methyladenosine-3'-phosphate
  modified_base 4: mod_base = OTHER; note = 2'-O-methylcytidine-3'-phosphate
  modified_base 5: mod_base = OTHER; note = 2'-O-methylguanosine-3'-phosphate
  modified_base 6: mod_base = OTHER; note = 2'-deoxy-2'-fluoroguanosine-3'-phosphate
  modified_base 7: mod_base = OTHER; note = 2'-O-methyluridine-3'-phosphate
  modified_base 8: mod_base = OTHER; note = 2'-deoxy-2'-fluoroguanosine-3'-phosphate
  modified_base 9: mod_base = OTHER; note = 2'-deoxy-2'-fluorocytidine-3'-phosphate
  modified_base 10: mod_base = OTHER; note = 2'-O-methyluridine-3'-phosphate
  modified_base 11: mod_base = OTHER; note = 2'-O-methylcytidine-3'-phosphate
  modified_base 12: mod_base = OTHER; note = 2'-O-methylcytidine-3'-phosphate
  modified_base 13: mod_base = OTHER; note = 2'-O-methyladenosine-3'-phosphate
  modified_base 14: mod_base = OTHER; note = 2'-deoxy-2'-fluoroguanosine-3'-phosphate
  modified_base 15: mod_base = OTHER; note = 2'-O-methyluridine-3'-phosphate
  modified_base 16: mod_base = OTHER; note = 2'-deoxy-2'-fluoroadenosine-3'-phosphate
  modified_base 17: mod_base = OTHER; note = 2'-O-methylguanosine-3'-phosphate
  modified_base 18: mod_base = OTHER; note = 2'-O-methyluridine-3'-phosphate
  modified_base 19: mod_base = OTHER; note = 2'-O-methylcytidine-3'-phosphate
  modified_base 20: mod_base = OTHER; note = 2'-O-methyluridine-3'-phosphate
  modified_base 21: mod_base = OTHER; note = 2'-O-methyluridine-3'-phosphorothioate
  modified_base 22: mod_base = OTHER; note = 2'-O-methyluridine-3'-phosphorothioate
  modified_base 23: mod_base = OTHER; note = 2'-O-methylcytidine
aaacggtgctccagtagtctttc

SEQ ID NO: 444 - RNA, 23 nt, synthetic construct
  source 1..23: mol_type = other RNA
gaaagactactggagcaccgtta

SEQ ID NO: 445 - RNA, 21 nt, synthetic construct
  source 1..21: mol_type = other RNA
  modified_base 1: mod_base = OTHER; note = 2'-O-methyluridine-3'-phosphorothioate
  modified_base 2: mod_base = OTHER; note = 2'-O-methylguanosine-3'-phosphorothioate
  modified_base 3: mod_base = OTHER; note = 2'-O-methylguanosine-3'-phosphate
  modified_base 4: mod_base = OTHER; note = 2'-O-methylcytidine-3'-phosphate
  modified_base 5: mod_base = OTHER; note = 2'-O-methyluridine-3'-phosphate
  modified_base 6: mod_base = OTHER; note = 2'-O-methyluridine-3'-phosphate
  modified_base 7: mod_base = OTHER; note = 2'-deoxy-2'-fluorocytidine-3'-phosphate
  modified_base 8: mod_base = OTHER; note = 2'-O-methyladenosine-3'-phosphate
  modified_base 9: mod_base = OTHER; note = 2'-deoxy-2'-fluoroguanosine-3'-phosphate
  modified_base 10: mod_base = OTHER; note = 2'-deoxy-2'-fluorouridine-3'-phosphate
  modified_base 11: mod_base = OTHER; note = 2'-deoxy-2'-fluorouridine-3'-phosphate
  modified_base 12: mod_base = OTHER; note = 2'-O-methylcytidine-3'-phosphate
  modified_base 13: mod_base = OTHER; note = 2'-O-methylcytidine-3'-phosphate
  modified_base 14: mod_base = OTHER; note = 2'-O-methylcytidine-3'-phosphate
  modified_base 15: mod_base = OTHER; note = 2'-O-methyluridine-3'-phosphate
  modified_base 16: mod_base = OTHER; note = 2'-O-methylguanosine-3'-phosphate
  modified_base 17: mod_base = OTHER; note = 2'-O-methyladenosine-3'-phosphate
  modified_base 18: mod_base = OTHER; note = 2'-O-methyladenosine-3'-phosphate
  modified_base 19: mod_base = OTHER; note = 2'-O-methyladenosine-3'-phosphate
  modified_base 20: mod_base = OTHER; note = 2'-O-methylguanosine-3'-phosphate
  modified_base 21: mod_base = OTHER; note = 2'-O-methyluridine-3'-phosphate ((2S,4R)-1-[29-[[2-(acetylamino)-2-deoxy-beta-D-galactopyra nosyl]oxy]-14,14-bis[[3-[[3-[[5-[[2-(acetylamino)-2-deoxy-b eta-D-galactopyranosyl]oxy]-1-oxopentyl]amino]propyl]amino] -3-oxopropoxy]methyl]-1,12,19,25-tetraoxo-16-oxa-13,20,24-t riazanonacos-1-yl]-4-hydroxy-2-pyrrolidinyl)methyl ester
tggcttcagttccctgaaagt

SEQ ID NO: 446 - RNA, 23 nt, synthetic construct
  source 1..23: mol_type = other RNA
  modified_base 1: mod_base = OTHER; note = 2'-O-methyladenosine-3'-phosphorothioate
  modified_base 2: mod_base = OTHER; note = 2'-deoxy-2'-fluorocytidine-3'-phosphorothioate
  modified_base 3: mod_base = OTHER; note = 2'-O-methyluridine-3'-phosphate
  modified_base 4: mod_base = OTHER; note = 2'-O-methyluridine-3'-phosphate
  modified_base 5: mod_base = OTHER; note = 2'-O-methyluridine-3'-phosphate
  modified_base 6: mod_base = OTHER; note = 2'-deoxy-2'-fluorocytidine-3'-phosphate
  modified_base 7: mod_base = OTHER; note = 2'-O-methyladenosine-3'-phosphate
  modified_base 8: mod_base = OTHER; note = 2'-deoxy-2'-fluoroguanosine-3'-phosphate
  modified_base 9: mod_base = OTHER; note = 2'-deoxy-2'-fluoroguanosine-3'-phosphate
  modified_base 10: mod_base = OTHER; note = 2'-O-methylguanosine-3'-phosphate
  modified_base 11: mod_base = OTHER; note = 2'-O-methyladenosine-3'-phosphate
  modified_base 12: mod_base = OTHER; note = 2'-O-methyladenosine-3'-phosphate
  modified_base 13: mod_base = OTHER; note = 2'-O-methylcytidine-3'-phosphate
  modified_base 14: mod_base = OTHER; note = 2'-deoxy-2'-fluorouridine-3'-phosphate
  modified_base 15: mod_base = OTHER; note = 2'-O-methylguanosine-3'-phosphate
  modified_base 16: mod_base = OTHER; note = 2'-deoxy-2'-fluoroadenosine-3'-phosphate
  modified_base 17: mod_base = OTHER; note = 2'-O-methyladenosine-3'-phosphate
  modified_base 18: mod_base = OTHER; note = 2'-O-methylguanosine-3'-phosphate
  modified_base 19: mod_base = OTHER; note = 2'-O-methylcytidine-3'-phosphate
  modified_base 20: mod_base = OTHER; note = 2'-O-methylcytidine-3'-phosphate
  modified_base 21: mod_base = OTHER; note = 2'-O-methyladenosine-3'-phosphorothioate
  modified_base 22: mod_base = OTHER; note = 2'-O-methyluridine-3'-phosphorothioate
  modified_base 23: mod_base = OTHER; note = 2'-O-methylcytidine
actttcagggaactgaagccatc

SEQ ID NO: 447 - RNA, 23 nt, synthetic construct
  source 1..23: mol_type = other RNA
gatggcttcagttccctgaaaga

SEQ ID NO: 448 - RNA, 21 nt, synthetic construct
  source 1..21: mol_type = other RNA
  modified_base 1: mod_base = OTHER; note = 2'-O-methylguanosine-3'-phosphorothioate
  modified_base 2: mod_base = OTHER; note = 2'-O-methylcytidine-3'-phosphorothioate
  modified_base 3: mod_base = OTHER; note = 2'-O-methylcytidine-3'-phosphate
  modified_base 4: mod_base = OTHER; note = 2'-O-methyluridine-3'-phosphate
  modified_base 5: mod_base = OTHER; note = 2'-O-methylcytidine-3'-phosphate
  modified_base 6: mod_base = OTHER; note = 2'-O-methylcytidine-3'-phosphate
  modified_base 7: mod_base = OTHER; note = 2'-deoxy-2'-fluorocytidine-3'-phosphate
  modified_base 8: mod_base = OTHER; note = 2'-O-methyladenosine-3'-phosphate
  modified_base 9: mod_base = OTHER; note = 2'-deoxy-2'-fluoroadenosine-3'-phosphate
  modified_base 10: mod_base = OTHER; note = 2'-deoxy-2'-fluorouridine-3'-phosphate
  modified_base 11: mod_base = OTHER; note = 2'-deoxy-2'-fluoroadenosine-3'-phosphate
  modified_base 12: mod_base = OTHER; note = 2'-O-methyladenosine-3'-phosphate
  modified_base 13: mod_base = OTHER; note = 2'-O-methyladenosine-3'-phosphate
  modified_base 14: mod_base = OTHER; note = 2'-O-methylguanosine-3'-phosphate
  modified_base 15: mod_base = OTHER; note = 2'-O-methylcytidine-3'-phosphate
  modified_base 16: mod_base = OTHER; note = 2'-O-methyluridine-3'-phosphate
  modified_base 17: mod_base = OTHER; note = 2'-O-methylguanosine-3'-phosphate
  modified_base 18: mod_base = OTHER; note = 2'-O-methylguanosine-3'-phosphate
  modified_base 19: mod_base = OTHER; note = 2'-O-methyladenosine-3'-phosphate
  modified_base 20: mod_base = OTHER; note = 2'-O-methylcytidine-3'-phosphate
  modified_base 21: mod_base = OTHER; note = 2'-O-methyluridine-3'-phosphate ((2S,4R)-1-[29-[[2-(acetylamino)-2-deoxy-beta-D-galactopyra nosyl]oxy]-14,14-bis[[3-[[3-[[5-[[2-(acetylamino)-2-deoxy-b eta-D-galactopyranosyl]oxy]-1-oxopentyl]amino]propyl]amino] -3-oxopropoxy]methyl]-1,12,19,25-tetraoxo-16-oxa-13,20,24-t riazanonacos-1-yl]-4-hydroxy-2-pyrrolidinyl)methyl ester
gcctcccaataaagctggact

SEQ ID NO: 449 - RNA, 23 nt, synthetic construct
  source 1..23: mol_type = other RNA
  modified_base 1: mod_base = OTHER; note = 2'-O-methyladenosine-3'-phosphorothioate
  modified_base 2: mod_base = OTHER; note = 2'-deoxy-2'-fluoroguanosine-3'-phosphorothioate
  modified_base 3: mod_base = OTHER; note = 2'-O-methyluridine-3'-phosphate
  modified_base 4: mod_base = OTHER; note = 2'-O-methylcytidine-3'-phosphate
  modified_base 5: mod_base = OTHER; note = 2'-O-methylcytidine-3'-phosphate
  modified_base 6: mod_base = OTHER; note = 2'-deoxy-2'-fluoroadenosine-3'-phosphate
  modified_base 7: mod_base = OTHER; note = 2'-O-methylguanosine-3'-phosphate
  modified_base 8: mod_base = OTHER; note = 2'-deoxy-2'-fluorocytidine-3'-phosphate
  modified_base 9: mod_base = OTHER; note = 2'-deoxy-2'-fluorouridine-3'-phosphate
  modified_base 10: mod_base = OTHER; note = 2'-O-methyluridine-3'-phosphate
  modified_base 11: mod_base = OTHER; note = 2'-O-methyluridine-3'-phosphate
  modified_base 12: mod_base = OTHER; note = 2'-O-methyladenosine-3'-phosphate
  modified_base 13: mod_base = OTHER; note = 2'-O-methyluridine-3'-phosphate
  modified_base 14: mod_base = OTHER; note = 2'-deoxy-2'-fluorouridine-3'-phosphate
  modified_base 15: mod_base = OTHER; note = 2'-O-methylguanosine-3'-phosphate
  modified_base 16: mod_base = OTHER; note = 2'-deoxy-2'-fluoroguanosine-3'-phosphate
  modified_base 17: mod_base = OTHER; note = 2'-O-methylguanosine-3'-phosphate
  modified_base 18: mod_base = OTHER; note = 2'-O-methyladenosine-3'-phosphate
  modified_base 19: mod_base = OTHER; note = 2'-O-methylguanosine-3'-phosphate
  modified_base 20: mod_base = OTHER; note = 2'-O-methylguanosine-3'-phosphate
  modified_base 21: mod_base = OTHER; note = 2'-O-methylcytidine-3'-phosphorothioate
  modified_base 22: mod_base = OTHER; note = 2'-O-methylcytidine-3'-phosphorothioate
  modified_base 23: mod_base = OTHER; note = 2'-O-methyladenosine
agtccagctttattgggaggcca

SEQ ID NO: 450 - RNA, 23 nt, synthetic construct
  source 1..23: mol_type = other RNA
tggcctcccaataaagctggaca

SEQ ID NO: 451 - RNA, 21 nt, synthetic construct
  source 1..21: mol_type = other RNA
  modified_base 1: mod_base = OTHER; note = 2'-O-methyladenosine-3'-phosphorothioate
  modified_base 2: mod_base = OTHER; note = 2'-O-methylguanosine-3'-phosphorothioate
  modified_base 3: mod_base = OTHER; note = 2'-O-methyluridine-3'-phosphate
  modified_base 4: mod_base = OTHER; note = 2'-O-methyluridine-3'-phosphate
  modified_base 5: mod_base = OTHER; note = 2'-O-methylcytidine-3'-phosphate
  modified_base 6: mod_base = OTHER; note = 2'-O-methylcytidine-3'-phosphate
  modified_base 7: mod_base = OTHER; note = 2'-deoxy-2'-fluorocytidine-3'-phosphate
  modified_base 8: mod_base = OTHER; note = 2'-O-methyluridine-3'-phosphate
  modified_base 9: mod_base = OTHER; note = 2'-deoxy-2'-fluoroguanosine-3'-phosphate
  modified_base 10: mod_base = OTHER; note = 2'-deoxy-2'-fluoroadenosine-3'-phosphate
  modified_base 11: mod_base = OTHER; note = 2'-deoxy-2'-fluoroadenosine-3'-phosphate
  modified_base 12: mod_base = OTHER; note = 2'-O-methyladenosine-3'-phosphate
  modified_base 13: mod_base = OTHER; note = 2'-O-methylguanosine-3'-phosphate
  modified_base 14: mod_base = OTHER; note = 2'-O-methyladenosine-3'-phosphate
  modified_base 15: mod_base = OTHER; note = 2'-O-methylcytidine-3'-phosphate
  modified_base 16: mod_base = OTHER; note = 2'-O-methyluridine-3'-phosphate
  modified_base 17: mod_base = OTHER; note = 2'-O-methyladenosine-3'-phosphate
  modified_base 18: mod_base = OTHER; note = 2'-O-methylcytidine-3'-phosphate
  modified_base 19: mod_base = OTHER; note = 2'-O-methyluridine-3'-phosphate
  modified_base 20: mod_base = OTHER; note = 2'-O-methylguanosine-3'-phosphate
  modified_base 21: mod_base = OTHER; note = 2'-O-methyluridine-3'-phosphate ((2S,4R)-1-[29-[[2-(acetylamino)-2-deoxy-beta-D-galactopyra nosyl]oxy]-14,14-bis[[3-[[3-[[5-[[2-(acetylamino)-2-deoxy-b eta-D-galactopyranosyl]oxy]-1-oxopentyl]amino]propyl]amino] -3-oxopropoxy]methyl]-1,12,19,25-tetraoxo-16-oxa-13,20,24-t riazanonacos-1-yl]-4-hydroxy-2-pyrrolidinyl)methyl ester
agttccctgaaagactactgt

SEQ ID NO: 452 - RNA, 23 nt, synthetic construct
  source 1..23: mol_type = other RNA
  modified_base 1: mod_base = OTHER; note = 2'-O-methyladenosine-3'-phosphorothioate
  modified_base 2: mod_base = OTHER; note = 2'-deoxy-2'-fluorocytidine-3'-phosphorothioate
  modified_base 3: mod_base = OTHER; note = 2'-O-methyladenosine-3'-phosphate
  modified_base 4: mod_base = OTHER; note = 2'-O-methylguanosine-3'-phosphate
  modified_base 5: mod_base = OTHER; note = 2'-O-methyluridine-3'-phosphate
  modified_base 6: mod_base = OTHER; note = 2'-deoxy-2'-fluoroadenosine-3'-phosphate
  modified_base 7: mod_base = OTHER; note = 2'-O-methylguanosine-3'-phosphate
  modified_base 8: mod_base = OTHER; note = 2'-deoxy-2'-fluorouridine-3'-phosphate
  modified_base 9: mod_base = OTHER; note = 2'-deoxy-2'-fluorocytidine-3'-phosphate
  modified_base 10: mod_base = OTHER; note = 2'-O-methyluridine-3'-phosphate
  modified_base 11: mod_base = OTHER; note = 2'-O-methyluridine-3'-phosphate
  modified_base 12: mod_base = OTHER; note = 2'-O-methyluridine-3'-phosphate
  modified_base 13: mod_base = OTHER; note = 2'-O-methylcytidine-3'-phosphate
  modified_base 14: mod_base = OTHER; note = 2'-deoxy-2'-fluoroadenosine-3'-phosphate
  modified_base 15: mod_base = OTHER; note = 2'-O-methylguanosine-3'-phosphate
  modified_base 16: mod_base = OTHER; note = 2'-deoxy-2'-fluoroguanosine-3'-phosphate
  modified_base 17: mod_base = OTHER; note = 2'-O-methylguanosine-3'-phosphate
  modified_base 18: mod_base = OTHER; note = 2'-O-methyladenosine-3'-phosphate
  modified_base 19: mod_base = OTHER; note = 2'-O-methyladenosine-3'-phosphate
  modified_base 20: mod_base = OTHER; note = 2'-O-methylcytidine-3'-phosphate
  modified_base 21: mod_base = OTHER; note = 2'-O-methyluridine-3'-phosphorothioate
  modified_base 22: mod_base = OTHER; note = 2'-O-methylguanosine-3'-phosphorothioate
  modified_base 23: mod_base = OTHER; note = 2'-O-methyladenosine
acagtagtctttcagggaactga

SEQ ID NO: 453 - RNA, 23 nt, synthetic construct
  source 1..23: mol_type = other RNA
tcagttccctgaaagactactgg

SEQ ID NO: 454 - RNA, 21 nt, synthetic construct
  source 1..21: mol_type = other RNA
  modified_base 1: mod_base = OTHER; note = 2'-O-methyladenosine-3'-phosphorothioate
  modified_base 2: mod_base = OTHER; note = 2'-O-methyladenosine-3'-phosphorothioate
  modified_base 3: mod_base = OTHER; note = 2'-O-methylguanosine-3'-phosphate
  modified_base 4: mod_base = OTHER; note = 2'-O-methylcytidine-3'-phosphate
  modified_base 5: mod_base = OTHER; note = 2'-O-methyluridine-3'-phosphate
  modified_base 6: mod_base = OTHER; note = 2'-O-methylguanosine-3'-phosphate
  modified_base 7: mod_base = OTHER; note = 2'-deoxy-2'-fluoroguanosine-3'-phosphate
  modified_base 8: mod_base = OTHER; note = 2'-O-methyladenosine-3'-phosphate
  modified_base 9: mod_base = OTHER; note = 2'-deoxy-2'-fluorocytidine-3'-phosphate
  modified_base 10: mod_base = OTHER; note = 2'-deoxy-2'-fluoroadenosine-3'-phosphate
  modified_base 11: mod_base = OTHER; note = 2'-deoxy-2'-fluoroadenosine-3'-phosphate
  modified_base 12: mod_base = OTHER; note = 2'-O-methylguanosine-3'-phosphate
  modified_base 13: mod_base = OTHER; note = 2'-O-methyladenosine-3'-phosphate
  modified_base 14: mod_base = OTHER; note = 2'-O-methyladenosine-3'-phosphate
  modified_base 15: mod_base = OTHER; note = 2'-O-methylguanosine-3'-phosphate
  modified_base 16: mod_base = OTHER; note = 2'-O-methylcytidine-3'-phosphate
  modified_base 17: mod_base = OTHER; note = 2'-O-methyluridine-3'-phosphate
  modified_base 18: mod_base = OTHER; note = 2'-O-methylguanosine-3'-phosphate
  modified_base 19: mod_base = OTHER; note = 2'-O-methylcytidine-3'-phosphate
  modified_base 20: mod_base = OTHER; note = 2'-O-methyluridine-3'-phosphate
  modified_base 21: mod_base = OTHER; note = 2'-O-methyluridine-3'-phosphate ((2S,4R)-1-[29-[[2-(acetylamino)-2-deoxy-beta-D-galactopyra nosyl]oxy]-14,14-bis[[3-[[3-[[5-[[2-(acetylamino)-2-deoxy-b eta-D-galactopyranosyl]oxy]-1-oxopentyl]amino]propyl]amino] -3-oxopropoxy]methyl]-1,12,19,25-tetraoxo-16-oxa-13,20,24-t riazanonacos-1-yl]-4-hydroxy-2-pyrrolidinyl)methyl ester
aagctggacaagaagctgctt

SEQ ID NO: 455 - RNA, 23 nt, synthetic construct
  source 1..23: mol_type = other RNA
  modified_base 1: mod_base = OTHER; note = 2'-O-methyladenosine-3'-phosphorothioate
  modified_base 2: mod_base = OTHER; note = 2'-deoxy-2'-fluoroadenosine-3'-phosphorothioate
  modified_base 3: mod_base = OTHER; note = 2'-O-methylguanosine-3'-phosphate
  modified_base 4: mod_base = OTHER; note = 2'-O-methylcytidine-3'-phosphate
  modified_base 5: mod_base = OTHER; note = 2'-O-methyladenosine-3'-phosphate
  modified_base 6: mod_base = OTHER; note = 2'-deoxy-2'-fluoroguanosine-3'-phosphate
  modified_base 7: mod_base = OTHER; note = 2'-O-methylcytidine-3'-phosphate
  modified_base 8: mod_base = OTHER; note = 2'-deoxy-2'-fluorouridine-3'-phosphate
  modified_base 9: mod_base = OTHER; note = 2'-deoxy-2'-fluorouridine-3'-phosphate
  modified_base 10: mod_base = OTHER; note = 2'-O-methylcytidine-3'-phosphate
  modified_base 11: mod_base = OTHER; note = 2'-O-methyluridine-3'-phosphate
  modified_base 12: mod_base = OTHER; note = 2'-O-methyluridine-3'-phosphate
  modified_base 13: mod_base = OTHER; note = 2'-O-methylguanosine-3'-phosphate
  modified_base 14: mod_base = OTHER; note = 2'-deoxy-2'-fluorouridine-3'-phosphate
  modified_base 15: mod_base = OTHER; note = 2'-O-methylcytidine-3'-phosphate
  modified_base 16: mod_base = OTHER; note = 2'-deoxy-2'-fluorocytidine-3'-phosphate
  modified_base 17: mod_base = OTHER; note = 2'-O-methyladenosine-3'-phosphate
  modified_base 18: mod_base = OTHER; note = 2'-O-methylguanosine-3'-phosphate
  modified_base 19: mod_base = OTHER; note = 2'-O-methylcytidine-3'-phosphate
  modified_base 20: mod_base = OTHER; note = 2'-O-methyluridine-3'-phosphate
  modified_base 21: mod_base = OTHER; note = 2'-O-methyluridine-3'-phosphorothioate
  modified_base 22: mod_base = OTHER; note = 2'-O-methyluridine-3'-phosphorothioate
  modified_base 23: mod_base = OTHER; note = 2'-O-methyladenosine
aagcagcttcttgtccagcttta

SEQ ID NO: 456 - RNA, 23 nt, synthetic construct
  source 1..23: mol_type = other RNA
taaagctggacaagaagctgcta

SEQ ID NO: 457 - RNA, 21 nt, synthetic construct
  source 1..21: mol_type = other RNA
  modified_base 1: mod_base = OTHER; note = 2'-O-methylguanosine-3'-phosphorothioate
  modified_base 2: mod_base = OTHER; note = 2'-O-methylcytidine-3'-phosphorothioate
  modified_base 3: mod_base = OTHER; note = 2'-O-methyluridine-3'-phosphate
  modified_base 4: mod_base = OTHER; note = 2'-O-methylguanosine-3'-phosphate
  modified_base 5: mod_base = OTHER; note = 2'-O-methylguanosine-3'-phosphate
  modified_base 6: mod_base = OTHER; note = 2'-O-methyladenosine-3'-phosphate
  modified_base 7: mod_base = OTHER; note = 2'-deoxy-2'-fluorocytidine-3'-phosphate
  modified_base 8: mod_base = OTHER; note = 2'-O-methyladenosine-3'-phosphate
  modified_base 9: mod_base = OTHER; note = 2'-deoxy-2'-fluoroadenosine-3'-phosphate
  modified_base 10: mod_base = OTHER; note = 2'-deoxy-2'-fluoroguanosine-3'-phosphate
  modified_base 11: mod_base = OTHER; note = 2'-deoxy-2'-fluoroadenosine-3'-phosphate
  modified_base 12: mod_base = OTHER; note = 2'-O-methyladenosine-3'-phosphate
  modified_base 13: mod_base = OTHER; note = 2'-O-methylguanosine-3'-phosphate
  modified_base 14: mod_base = OTHER; note = 2'-O-methylcytidine-3'-phosphate
  modified_base 15: mod_base = OTHER; note = 2'-O-methyluridine-3'-phosphate
  modified_base 16: mod_base = OTHER; note = 2'-O-methylguanosine-3'-phosphate
  modified_base 17: mod_base = OTHER; note = 2'-O-methylcytidine-3'-phosphate
  modified_base 18: mod_base = OTHER; note = 2'-O-methyluridine-3'-phosphate
  modified_base 19: mod_base = OTHER; note = 2'-O-methyladenosine-3'-phosphate
  modified_base 20: mod_base = OTHER; note = 2'-O-methyluridine-3'-phosphate
  modified_base 21: mod_base = OTHER; note = 2'-O-methyladenosine-3'-phosphate ((2S,4R)-1-[29-[[2-(acetylamino)-2-deoxy-beta-D-galactopyra nosyl]oxy]-14,14-bis[[3-[[3-[[5-[[2-(acetylamino)-2-deoxy-b eta-D-galactopyranosyl]oxy]-1-oxopentyl]amino]propyl]amino] -3-oxopropoxy]methyl]-1,12,19,25-tetraoxo-16-oxa-13,20,24-t riazanonacos-1-yl]-4-hydroxy-2-pyrrolidinyl)methyl ester
gctggacaagaagctgctata

SEQ ID NO: 458 - RNA, 23 nt, synthetic construct
  source 1..23: mol_type = other RNA
  modified_base 1: mod_base = OTHER; note = 2'-O-methyluridine-3'-phosphorothioate
  modified_base 2: mod_base = OTHER; note = 2'-deoxy-2'-fluoroadenosine-3'-phosphorothioate
  modified_base 3: mod_base = OTHER; note = 2'-O-methyluridine-3'-phosphate
  modified_base 4: mod_base = OTHER; note = 2'-O-methyladenosine-3'-phosphate
  modified_base 5: mod_base = OTHER; note = 2'-O-methylguanosine-3'-phosphate
  modified_base 6: mod_base = OTHER; note = 2'-deoxy-2'-fluorocytidine-3'-phosphate
  modified_base 7: mod_base = OTHER; note = 2'-O-methyladenosine-3'-phosphate
  modified_base 8: mod_base = OTHER; note = 2'-deoxy-2'-fluoroguanosine-3'-phosphate
  modified_base 9: mod_base = OTHER; note = 2'-deoxy-2'-fluorocytidine-3'-phosphate
  modified_base 10: mod_base = OTHER; note = 2'-O-methyluridine-3'-phosphate
  modified_base 11: mod_base = OTHER; note = 2'-O-methyluridine-3'-phosphate
  modified_base 12: mod_base = OTHER; note = 2'-O-methylcytidine-3'-phosphate
  modified_base 13: mod_base = OTHER; note = 2'-O-methyluridine-3'-phosphate
  modified_base 14: mod_base = OTHER; note = 2'-deoxy-2'-fluorouridine-3'-phosphate
  modified_base 15: mod_base = OTHER; note = 2'-O-methylguanosine-3'-phosphate
  modified_base 16: mod_base = OTHER; note = 2'-deoxy-2'-fluorouridine-3'-phosphate
  modified_base 17: mod_base = OTHER; note = 2'-O-methylcytidine-3'-phosphate
  modified_base 18: mod_base = OTHER; note = 2'-O-methylcytidine-3'-phosphate
  modified_base 19: mod_base = OTHER; note = 2'-O-methyladenosine-3'-phosphate
  modified_base 20: mod_base = OTHER; note = 2'-O-methylguanosine-3'-phosphate
  modified_base 21: mod_base = OTHER; note = 2'-O-methylcytidine-3'-phosphorothioate
  modified_base 22: mod_base = OTHER; note = 2'-O-methyluridine-3'-phosphorothioate
  modified_base 23: mod_base = OTHER; note = 2'-O-methyluridine
tatagcagcttcttgtccagctt

SEQ ID NO: 459 - RNA, 23 nt, synthetic construct
  source 1..23: mol_type = other RNA
gctggacaagaagctgctatata

SEQ ID NO: 460 - RNA, 21 nt, synthetic construct
  source 1..21: mol_type = other RNA
  modified_base 1: mod_base = OTHER; note = 2'-O-methylcytidine-3'-phosphorothioate
  modified_base 2: mod_base = OTHER; note = 2'-O-methylcytidine-3'-phosphorothioate
  modified_base 3: mod_base = OTHER; note = 2'-O-methylcytidine-3'-phosphate
  modified_base 4: mod_base = OTHER; note = 2'-O-methyluridine-3'-phosphate
  modified_base 5: mod_base = OTHER; note = 2'-O-methylguanosine-3'-phosphate
  modified_base 6: mod_base = OTHER; note = 2'-O-methyladenosine-3'-phosphate
  modified_base 7: mod_base = OTHER; note = 2'-deoxy-2'-fluoroadenosine-3'-phosphate
  modified_base 8: mod_base = OTHER; note = 2'-O-methyladenosine-3'-phosphate
  modified_base 9: mod_base = OTHER; note = 2'-deoxy-2'-fluoroguanosine-3'-phosphate
  modified_base 10: mod_base = OTHER; note = 2'-deoxy-2'-fluoroadenosine-3'-phosphate
  modified_base 11: mod_base = OTHER; note = 2'-deoxy-2'-fluorocytidine-3'-phosphate
  modified_base 12: mod_base = OTHER; note = 2'-O-methyluridine-3'-phosphate
  modified_base 13: mod_base = OTHER; note = 2'-O-methyladenosine-3'-phosphate
  modified_base 14: mod_base = OTHER; note = 2'-O-methylcytidine-3'-phosphate
  modified_base 15: mod_base = OTHER; note = 2'-O-methyluridine-3'-phosphate
  modified_base 16: mod_base = OTHER; note = 2'-O-methylguanosine-3'-phosphate
  modified_base 17: mod_base = OTHER; note = 2'-O-methylguanosine-3'-phosphate
  modified_base 18: mod_base = OTHER; note = 2'-O-methyladenosine-3'-phosphate
  modified_base 19: mod_base = OTHER; note = 2'-O-methylguanosine-3'-phosphate
  modified_base 20: mod_base = OTHER; note = 2'-O-methylcytidine-3'-phosphate
  modified_base 21: mod_base = OTHER; note = 2'-O-methyluridine-3'-phosphate ((2S,4R)-1-[29-[[2-(acetylamino)-2-deoxy-beta-D-galactopyra nosyl]oxy]-14,14-bis[[3-[[3-[[5-[[2-(acetylamino)-2-deoxy-b eta-D-galactopyranosyl]oxy]-1-oxopentyl]amino]propyl]amino] -3-oxopropoxy]methyl]-1,12,19,25-tetraoxo-16-oxa-13,20,24-t riazanonacos-1-yl]-4-hydroxy-2-pyrrolidinyl)methyl ester
ccctgaaagactactggagct

SEQ ID NO: 461 - RNA, 23 nt, synthetic construct
  source 1..23: mol_type = other RNA
  modified_base 1: mod_base = OTHER; note = 2'-O-methyladenosine-3'-phosphorothioate
  modified_base 2: mod_base = OTHER; note = 2'-deoxy-2'-fluoroguanosine-3'-phosphorothioate
  modified_base 3: mod_base = OTHER; note = 2'-O-methylcytidine-3'-phosphate
  modified_base 4: mod_base = OTHER; note = 2'-O-methyluridine-3'-phosphate
  modified_base 5: mod_base = OTHER; note = 2'-O-methylcytidine-3'-phosphate
  modified_base 6: mod_base = OTHER; note = 2'-deoxy-2'-fluorocytidine-3'-phosphate
  modified_base 7: mod_base = OTHER; note = 2'-O-methyladenosine-3'-phosphate
  modified_base 8: mod_base = OTHER; note = 2'-deoxy-2'-fluoroguanosine-3'-phosphate
  modified_base 9: mod_base = OTHER; note = 2'-deoxy-2'-fluorouridine-3'-phosphate
  modified_base 10: mod_base = OTHER; note = 2'-O-methyladenosine-3'-phosphate
  modified_base 11: mod_base = OTHER; note = 2'-O-methylguanosine-3'-phosphate
  modified_base 12: mod_base = OTHER; note = 2'-O-methyluridine-3'-phosphate
  modified_base 13: mod_base = OTHER; note = 2'-O-methylcytidine-3'-phosphate
  modified_base 14: mod_base = OTHER; note = 2'-deoxy-2'-fluorouridine-3'-phosphate
  modified_base 15: mod_base = OTHER; note = 2'-O-methyluridine-3'-phosphate
  modified_base 16: mod_base = OTHER; note = 2'-deoxy-2'-fluorouridine-3'-phosphate
  modified_base 17: mod_base = OTHER; note = 2'-O-methylcytidine-3'-phosphate
  modified_base 18: mod_base = OTHER; note = 2'-O-methyladenosine-3'-phosphate
  modified_base 19: mod_base = OTHER; note = 2'-O-methylguanosine-3'-phosphate
  modified_base 20: mod_base = OTHER; note = 2'-O-methylguanosine-3'-phosphate
  modified_base 21: mod_base = OTHER; note = 2'-O-methylguanosine-3'-phosphorothioate
  modified_base 22: mod_base = OTHER; note = 2'-O-methyladenosine-3'-phosphorothioate
  modified_base 23: mod_base = OTHER; note = 2'-O-methyladenosine
agctccagtagtctttcagggaa

SEQ ID NO: 462 - RNA, 23 nt, synthetic construct
  source 1..23: mol_type = other RNA
ttccctgaaagactactggagca

SEQ ID NO: 463 - RNA, 21 nt, synthetic construct
  source 1..21: mol_type = other RNA
  modified_base 1: mod_base = OTHER; note = 2'-O-methyladenosine-3'-phosphorothioate
  modified_base 2: mod_base = OTHER; note = 2'-O-methyladenosine-3'-phosphorothioate
  modified_base 3: mod_base = OTHER; note = 2'-O-methyluridine-3'-phosphate
  modified_base 4: mod_base = OTHER; note = 2'-O-methyladenosine-3'-phosphate
  modified_base 5: mod_base = OTHER; note = 2'-O-methyladenosine-3'-phosphate
  modified_base 6: mod_base = OTHER; note = 2'-O-methyladenosine-3'-phosphate
  modified_base 7: mod_base = OTHER; note = 2'-deoxy-2'-fluoroguanosine-3'-phosphate
  modified_base 8: mod_base = OTHER; note = 2'-O-methylcytidine-3'-phosphate
  modified_base 9: mod_base = OTHER; note = 2'-deoxy-2'-fluorouridine-3'-phosphate
  modified_base 10: mod_base = OTHER; note = 2'-deoxy-2'-fluoroguanosine-3'-phosphate
  modified_base 11: mod_base = OTHER; note = 2'-deoxy-2'-fluoroguanosine-3'-phosphate
  modified_base 12: mod_base = OTHER; note = 2'-O-methyladenosine-3'-phosphate
  modified_base 13: mod_base = OTHER; note = 2'-O-methylcytidine-3'-phosphate
  modified_base 14: mod_base = OTHER; note = 2'-O-methyladenosine-3'-phosphate
  modified_base 15: mod_base = OTHER; note = 2'-O-methyladenosine-3'-phosphate
  modified_base 16: mod_base = OTHER; note = 2'-O-methylguanosine-3'-phosphate
  modified_base 17: mod_base = OTHER; note = 2'-O-methyladenosine-3'-phosphate
  modified_base 18: mod_base = OTHER; note = 2'-O-methyladenosine-3'-phosphate
  modified_base 19: mod_base = OTHER; note = 2'-O-methylguanosine-3'-phosphate
  modified_base 20: mod_base = OTHER; note = 2'-O-methylcytidine-3'-phosphate
  modified_base 21: mod_base = OTHER; note = 2'-O-methyluridine-3'-phosphate ((2S,4R)-1-[29-[[2-(acetylamino)-2-deoxy-beta-D-galactopyra nosyl]oxy]-14,14-bis[[3-[[3-[[5-[[2-(acetylamino)-2-deoxy-b eta-D-galactopyranosyl]oxy]-1-oxopentyl]amino]propyl]amino] -3-oxopropoxy]methyl]-1,12,19,25-tetraoxo-16-oxa-13,20,24-t riazanonacos-1-yl]-4-hydroxy-2-pyrrolidinyl)methyl ester
aataaagctggacaagaagct

SEQ ID NO: 464 - RNA, 23 nt, synthetic construct
  source 1..23: mol_type = other RNA
  modified_base 1: mod_base = OTHER; note = 2'-O-methyladenosine-3'-phosphorothioate
  modified_base 2: mod_base = OTHER; note = 2'-deoxy-2'-fluoroguanosine-3'-phosphorothioate
  modified_base 3: mod_base = OTHER; note = 2'-O-methylcytidine-3'-phosphate
  modified_base 4: mod_base = OTHER; note = 2'-O-methyluridine-3'-phosphate
  modified_base 5: mod_base = OTHER; note = 2'-O-methyluridine-3'-phosphate
  modified_base 6: mod_base = OTHER; note = 2'-deoxy-2'-fluorocytidine-3'-phosphate
  modified_base 7: mod_base = OTHER; note = 2'-O-methyluridine-3'-phosphate
  modified_base 8: mod_base = OTHER; note = 2'-deoxy-2'-fluorouridine-3'-phosphate
  modified_base 9: mod_base = OTHER; note = 2'-deoxy-2'-fluoroguanosine-3'-phosphate
  modified_base 10: mod_base = OTHER; note = 2'-O-methyluridine-3'-phosphate
  modified_base 11: mod_base = OTHER; note = 2'-O-methylcytidine-3'-phosphate
  modified_base 12: mod_base = OTHER; note = 2'-O-methylcytidine-3'-phosphate
  modified_base 13: mod_base = OTHER; note = 2'-O-methyladenosine-3'-phosphate
  modified_base 14: mod_base = OTHER; note = 2'-deoxy-2'-fluoroguanosine-3'-phosphate
  modified_base 15: mod_base = OTHER; note = 2'-O-methylcytidine-3'-phosphate
  modified_base 16: mod_base = OTHER; note = 2'-deoxy-2'-fluorouridine-3'-phosphate
  modified_base 17: mod_base = OTHER; note = 2'-O-methyluridine-3'-phosphate
  modified_base 18: mod_base = OTHER; note = 2'-O-methyluridine-3'-phosphate
  modified_base 19: mod_base = OTHER; note = 2'-O-methyladenosine-3'-phosphate
  modified_base 20: mod_base = OTHER; note = 2'-O-methyluridine-3'-phosphate
  modified_base 21: mod_base = OTHER; note = 2'-O-methyluridine-3'-phosphorothioate
  modified_base 22: mod_base = OTHER; note = 2'-O-methylguanosine-3'-phosphorothioate
  modified_base 23: mod_base = OTHER; note = 2'-O-methylguanosine
agcttcttgtccagctttattgg

SEQ ID NO: 465 - RNA, 23 nt, synthetic construct
  source 1..23: mol_type = other RNA
ccaataaagctggacaagaagct

SEQ ID NO: 466 - RNA, 21 nt, synthetic construct
  source 1..21: mol_type = other RNA
  modified_base 1: mod_base = OTHER; note = 2'-O-methylguanosine-3'-phosphorothioate
  modified_base 2: mod_base = OTHER; note = 2'-O-methylguanosine-3'-phosphorothioate
  modified_base 3: mod_base = OTHER; note = 2'-O-methylcytidine-3'-phosphate
  modified_base 4: mod_base = OTHER; note = 2'-O-methyluridine-3'-phosphate
  modified_base 5: mod_base = OTHER; note = 2'-O-methylguanosine-3'-phosphate
  modified_base 6: mod_base = OTHER; note = 2'-O-methylguanosine-3'-phosphate
  modified_base 7: mod_base = OTHER; note = 2'-deoxy-2'-fluoroguanosine-3'-phosphate
  modified_base 8: mod_base = OTHER; note = 2'-O-methyluridine-3'-phosphate
  modified_base 9: mod_base = OTHER; note = 2'-deoxy-2'-fluoroguanosine-3'-phosphate
  modified_base 10: mod_base = OTHER; note = 2'-deoxy-2'-fluoroadenosine-3'-phosphate
  modified_base 11: mod_base = OTHER; note = 2'-deoxy-2'-fluorocytidine-3'-phosphate
  modified_base 12: mod_base = OTHER; note = 2'-O-methylcytidine-3'-phosphate
  modified_base 13: mod_base = OTHER; note = 2'-O-methylguanosine-3'-phosphate
  modified_base 14: mod_base = OTHER; note = 2'-O-methyladenosine-3'-phosphate
  modified_base 15: mod_base = OTHER; note = 2'-O-methyluridine-3'-phosphate
  modified_base 16: mod_base = OTHER; note = 2'-O-methylguanosine-3'-phosphate
  modified_base 17: mod_base = OTHER; note = 2'-O-methylguanosine-3'-phosphate
  modified_base 18: mod_base = OTHER; note = 2'-O-methylcytidine-3'-phosphate
  modified_base 19: mod_base = OTHER; note = 2'-O-methyluridine-3'-phosphate
  modified_base 20: mod_base = OTHER; note = 2'-O-methyluridine-3'-phosphate
  modified_base 21: mod_base = OTHER; note = 2'-O-methyluridine-3'-phosphate ((2S,4R)-1-[29-[[2-(acetylamino)-2-deoxy-beta-D-galactopyra nosyl]oxy]-14,14-bis[[3-[[3-[[5-[[2-(acetylamino)-2-deoxy-b eta-D-galactopyranosyl]oxy]-1-oxopentyl]amino]propyl]amino] -3-oxopropoxy]methyl]-1,12,19,25-tetraoxo-16-oxa-13,20,24-t riazanonacos-1-yl]-4-hydroxy-2-pyrrolidinyl)methyl ester
ggctgggtgaccgatggcttt

SEQ ID NO: 467 - RNA, 23 nt, synthetic construct
  source 1..23: mol_type = other RNA
  modified_base 1: mod_base = OTHER; note = 2'-O-methyladenosine-3'-phosphorothioate
  modified_base 2: mod_base = OTHER; note = 2'-deoxy-2'-fluoroadenosine-3'-phosphorothioate
  modified_base 3: mod_base = OTHER; note = 2'-O-methyladenosine-3'-phosphate
  modified_base 4: mod_base = OTHER; note = 2'-O-methylguanosine-3'-phosphate
  modified_base 5: mod_base = OTHER; note = 2'-O-methylcytidine-3'-phosphate
  modified_base 6: mod_base = OTHER; note = 2'-deoxy-2'-fluorocytidine-3'-phosphate
  modified_base 7: mod_base = OTHER; note = 2'-O-methyladenosine-3'-phosphate
  modified_base 8: mod_base = OTHER; note = 2'-deoxy-2'-fluorouridine-3'-phosphate
  modified_base 9: mod_base = OTHER; note = 2'-deoxy-2'-fluorocytidine-3'-phosphate
  modified_base 10: mod_base = OTHER; note = 2'-O-methylguanosine-3'-phosphate
  modified_base 11: mod_base = OTHER; note = 2'-O-methylguanosine-3'-phosphate
  modified_base 12: mod_base = OTHER; note = 2'-O-methyluridine-3'-phosphate
  modified_base 13: mod_base = OTHER; note = 2'-O-methylcytidine-3'-phosphate
  modified_base 14: mod_base = OTHER; note = 2'-deoxy-2'-fluoroadenosine-3'-phosphate
  modified_base 15: mod_base = OTHER; note = 2'-O-methylcytidine-3'-phosphate
  modified_base 16: mod_base = OTHER; note = 2'-deoxy-2'-fluorocytidine-3'-phosphate
  modified_base 17: mod_base = OTHER; note = 2'-O-methylcytidine-3'-phosphate
  modified_base 18: mod_base = OTHER; note = 2'-O-methyladenosine-3'-phosphate
  modified_base 19: mod_base = OTHER; note = 2'-O-methylguanosine-3'-phosphate
  modified_base 20: mod_base = OTHER; note = 2'-O-methylcytidine-3'-phosphate
  modified_base 21: mod_base = OTHER; note = 2'-O-methylcytidine-3'-phosphorothioate
  modified_base 22: mod_base = OTHER; note = 2'-O-methylcytidine-3'-phosphorothioate
  modified_base 23: mod_base = OTHER; note = 2'-O-methylcytidine
aaagccatcggtcacccagcccc

SEQ ID NO: 468 - RNA, 23 nt, synthetic construct
  source 1..23: mol_type = other RNA
ggggctgggtgaccgatggcttc

SEQ ID NO: 469 - RNA, 21 nt, synthetic construct
  source 1..21: mol_type = other RNA
  modified_base 1: mod_base = OTHER; note = 2'-O-methylcytidine-3'-phosphorothioate
  modified_base 2: mod_base = OTHER; note = 2'-O-methyladenosine-3'-phosphorothioate
  modified_base 3: mod_base = OTHER; note = 2'-O-methylguanosine-3'-phosphate
  modified_base 4: mod_base = OTHER; note = 2'-O-methyluridine-3'-phosphate
  modified_base 5: mod_base = OTHER; note = 2'-O-methyluridine-3'-phosphate
  modified_base 6: mod_base = OTHER; note = 2'-O-methylcytidine-3'-phosphate
  modified_base 7: mod_base = OTHER; note = 2'-deoxy-2'-fluorocytidine-3'-phosphate
  modified_base 8: mod_base = OTHER; note = 2'-O-methylcytidine-3'-phosphate
  modified_base 9: mod_base = OTHER; note = 2'-deoxy-2'-fluorouridine-3'-phosphate
  modified_base 10: mod_base = OTHER; note = 2'-deoxy-2'-fluoroguanosine-3'-phosphate
  modified_base 11: mod_base = OTHER; note = 2'-deoxy-2'-fluoroadenosine-3'-phosphate
  modified_base 12: mod_base = OTHER; note = 2'-O-methyladenosine-3'-phosphate
  modified_base 13: mod_base = OTHER; note = 2'-O-methyladenosine-3'-phosphate
  modified_base 14: mod_base = OTHER; note = 2'-O-methylguanosine-3'-phosphate
  modified_base 15: mod_base = OTHER; note = 2'-O-methyladenosine-3'-phosphate
  modified_base 16: mod_base = OTHER; note = 2'-O-methylcytidine-3'-phosphate
  modified_base 17: mod_base = OTHER; note = 2'-O-methyluridine-3'-phosphate
  modified_base 18: mod_base = OTHER; note = 2'-O-methyladenosine-3'-phosphate
  modified_base 19: mod_base = OTHER; note = 2'-O-methylcytidine-3'-phosphate
  modified_base 20: mod_base = OTHER; note = 2'-O-methyluridine-3'-phosphate
  modified_base 21: mod_base = OTHER; note = 2'-O-methyluridine-3'-phosphate ((2S,4R)-1-[29-[[2-(acetylamino)-2-deoxy-beta-D-galactopyra nosyl]oxy]-14,14-bis[[3-[[3-[[5-[[2-(acetylamino)-2-deoxy-b eta-D-galactopyranosyl]oxy]-1-oxopentyl]amino]propyl]amino] -3-oxopropoxy]methyl]-1,12,19,25-tetraoxo-16-oxa-13,20,24-t riazanonacos-1-yl]-4-hydroxy-2-pyrrolidinyl)methyl ester
cagttccctgaaagactactt

SEQ ID NO: 470 - RNA, 23 nt, synthetic construct
  source 1..23: mol_type = other RNA
  modified_base 1: mod_base = OTHER; note = 2'-O-methyladenosine-3'-phosphorothioate
  modified_base 2: mod_base = OTHER; note = 2'-deoxy-2'-fluoroadenosine-3'-phosphorothioate
  modified_base 3: mod_base = OTHER; note = 2'-O-methylguanosine-3'-phosphate
  modified_base 4: mod_base = OTHER; note = 2'-O-methyluridine-3'-phosphate
  modified_base 5: mod_base = OTHER; note = 2'-O-methyladenosine-3'-phosphate
  modified_base 6: mod_base = OTHER; note = 2'-deoxy-2'-fluoroguanosine-3'-phosphate
  modified_base 7: mod_base = OTHER; note = 2'-O-methyluridine-3'-phosphate
  modified_base 8: mod_base = OTHER; note = 2'-deoxy-2'-fluorocytidine-3'-phosphate
  modified_base 9: mod_base = OTHER; note = 2'-deoxy-2'-fluorouridine-3'-phosphate
  modified_base 10: mod_base = OTHER; note = 2'-O-methyluridine-3'-phosphate
  modified_base 11: mod_base = OTHER; note = 2'-O-methyluridine-3'-phosphate
  modified_base 12: mod_base = OTHER; note = 2'-O-methylcytidine-3'-phosphate
  modified_base 13: mod_base = OTHER; note = 2'-O-methyladenosine-3'-phosphate
  modified_base 14: mod_base = OTHER; note = 2'-deoxy-2'-fluoroguanosine-3'-phosphate
  modified_base 15: mod_base = OTHER; note = 2'-O-methylguanosine-3'-phosphate
  modified_base 16: mod_base = OTHER; note = 2'-deoxy-2'-fluoroguanosine-3'-phosphate
  modified_base 17: mod_base = OTHER; note = 2'-O-methyladenosine-3'-phosphate
  modified_base 18: mod_base = OTHER; note = 2'-O-methyladenosine-3'-phosphate
  modified_base 19: mod_base = OTHER; note = 2'-O-methylcytidine-3'-phosphate
  modified_base 20: mod_base = OTHER; note = 2'-O-methyluridine-3'-phosphate
  modified_base 21: mod_base = OTHER; note = 2'-O-methylguanosine-3'-phosphorothioate
  modified_base 22: mod_base = OTHER; note = 2'-O-methyladenosine-3'-phosphorothioate
  modified_base 23: mod_base = OTHER; note = 2'-O-methyladenosine
aagtagtctttcagggaactgaa

SEQ ID NO: 471 - RNA, 23 nt, synthetic construct
  source 1..23: mol_type = other RNA
ttcagttccctgaaagactactg

SEQ ID NO: 472 - RNA, 21 nt, synthetic construct
  source 1..21: mol_type = other RNA
  modified_base 1: mod_base = OTHER; note = 2'-O-methylcytidine-3'-phosphorothioate
  modified_base 2: mod_base = OTHER; note = 2'-O-methylcytidine-3'-phosphorothioate
  modified_base 3: mod_base = OTHER; note = 2'-O-methyluridine-3'-phosphate
  modified_base 4: mod_base = OTHER; note = 2'-O-methylguanosine-3'-phosphate
  modified_base 5: mod_base = OTHER; note = 2'-O-methyladenosine-3'-phosphate
  modified_base 6: mod_base = OTHER; note = 2'-O-methyladenosine-3'-phosphate
  modified_base 7: mod_base = OTHER; note = 2'-deoxy-2'-fluoroadenosine-3'-phosphate
  modified_base 8: mod_base = OTHER; note = 2'-O-methylguanosine-3'-phosphate
  modified_base 9: mod_base = OTHER; note = 2'-deoxy-2'-fluoroadenosine-3'-phosphate
  modified_base 10: mod_base = OTHER; note = 2'-deoxy-2'-fluorocytidine-3'-phosphate
  modified_base 11: mod_base = OTHER; note = 2'-deoxy-2'-fluorouridine-3'-phosphate
  modified_base 12: mod_base = OTHER; note = 2'-O-methyladenosine-3'-phosphate
  modified_base 13: mod_base = OTHER; note = 2'-O-methylcytidine-3'-phosphate
  modified_base 14: mod_base = OTHER; note = 2'-O-methyluridine-3'-phosphate
  modified_base 15: mod_base = OTHER; note = 2'-O-methylguanosine-3'-phosphate
  modified_base 16: mod_base = OTHER; note = 2'-O-methylguanosine-3'-phosphate
  modified_base 17: mod_base = OTHER; note = 2'-O-methyladenosine-3'-phosphate
  modified_base 18: mod_base = OTHER; note = 2'-O-methylguanosine-3'-phosphate
  modified_base 19: mod_base = OTHER; note = 2'-O-methylcytidine-3'-phosphate
  modified_base 20: mod_base = OTHER; note = 2'-O-methyladenosine-3'-phosphate
  modified_base 21: mod_base = OTHER; note = 2'-O-methyluridine-3'-phosphate ((2S,4R)-1-[29-[[2-(acetylamino)-2-deoxy-beta-D-galactopyra nosyl]oxy]-14,14-bis[[3-[[3-[[5-[[2-(acetylamino)-2-deoxy-b eta-D-galactopyranosyl]oxy]-1-oxopentyl]amino]propyl]amino] -3-oxopropoxy]methyl]-1,12,19,25-tetraoxo-16-oxa-13,20,24-t riazanonacos-1-yl]-4-hydroxy-2-pyrrolidinyl)methyl ester
cctgaaagactactggagcat

SEQ ID NO: 473 - RNA, 23 nt, synthetic construct
  source 1..23: mol_type = other RNA
  modified_base 1: mod_base = OTHER; note = 2'-O-methyladenosine-3'-phosphorothioate
  modified_base 2: mod_base = OTHER; note = 2'-deoxy-2'-fluorouridine-3'-phosphorothioate
  modified_base 3: mod_base = OTHER; note = 2'-O-methylguanosine-3'-phosphate
  modified_base 4: mod_base = OTHER; note = 2'-O-methylcytidine-3'-phosphate
  modified_base 5: mod_base = OTHER; note = 2'-O-methyluridine-3'-phosphate
  modified_base 6: mod_base = OTHER; note = 2'-deoxy-2'-fluorocytidine-3'-phosphate
  modified_base 7: mod_base = OTHER; note = 2'-O-methylcytidine-3'-phosphate
  modified_base 8: mod_base = OTHER; note = 2'-deoxy-2'-fluoroadenosine-3'-phosphate
  modified_base 9: mod_base = OTHER; note = 2'-deoxy-2'-fluoroguanosine-3'-phosphate
  modified_base 10: mod_base = OTHER; note = 2'-O-methyluridine-3'-phosphate
  modified_base 11: mod_base = OTHER; note = 2'-O-methyladenosine-3'-phosphate
  modified_base 12: mod_base = OTHER; note = 2'-O-methylguanosine-3'-phosphate
  modified_base 13: mod_base = OTHER; note = 2'-O-methyluridine-3'-phosphate
  modified_base 14: mod_base = OTHER; note = 2'-deoxy-2'-fluorocytidine-3'-phosphate
  modified_base 15: mod_base = OTHER; note = 2'-O-methyluridine-3'-phosphate
  modified_base 16: mod_base = OTHER; note = 2'-deoxy-2'-fluorouridine-3'-phosphate
  modified_base 17: mod_base = OTHER; note = 2'-O-methyluridine-3'-phosphate
  modified_base 18: mod_base = OTHER; note = 2'-O-methylcytidine-3'-phosphate
  modified_base 19: mod_base = OTHER; note = 2'-O-methyladenosine-3'-phosphate
  modified_base 20: mod_base = OTHER; note = 2'-O-methylguanosine-3'-phosphate
  modified_base 21: mod_base = OTHER; note = 2'-O-methylguanosine-3'-phosphorothioate
  modified_base 22: mod_base = OTHER; note = 2'-O-methylguanosine-3'-phosphorothioate
  modified_base 23: mod_base = OTHER; note = 2'-O-methyladenosine
atgctccagtagtctttcaggga

SEQ ID NO: 474 - RNA, 23 nt, synthetic construct
  source 1..23: mol_type = other RNA
tccctgaaagactactggagcac

SEQ ID NO: 475 - RNA, 21 nt, synthetic construct
  source 1..21: mol_type = other RNA
  modified_base 1: mod_base = OTHER; note = 2'-O-methylcytidine-3'-phosphorothioate
  modified_base 2: mod_base = OTHER; note = 2'-O-methyladenosine-3'-phosphorothioate
  modified_base 3: mod_base = OTHER; note = 2'-O-methyluridine-3'-phosphate
  modified_base 4: mod_base = OTHER; note = 2'-O-methylcytidine-3'-phosphate
  modified_base 5: mod_base = OTHER; note = 2'-O-methylcytidine-3'-phosphate
  modified_base 6: mod_base = OTHER; note = 2'-O-methylcytidine-3'-phosphate
  modified_base 7: mod_base = OTHER; note = 2'-deoxy-2'-fluorouridine-3'-phosphate
  modified_base 8: mod_base = OTHER; note = 2'-O-methyladenosine-3'-phosphate
  modified_base 9: mod_base = OTHER; note = 2'-deoxy-2'-fluoroguanosine-3'-phosphate
  modified_base 10: mod_base = OTHER; note = 2'-deoxy-2'-fluoroadenosine-3'-phosphate
  modified_base 11: mod_base = OTHER; note = 2'-deoxy-2'-fluoroguanosine-3'-phosphate
  modified_base 12: mod_base = OTHER; note = 2'-O-methylguanosine-3'-phosphate
  modified_base 13: mod_base = OTHER; note = 2'-O-methylcytidine-3'-phosphate
  modified_base 14: mod_base = OTHER; note = 2'-O-methyladenosine-3'-phosphate
  modified_base 15: mod_base = OTHER; note = 2'-O-methylguanosine-3'-phosphate
  modified_base 16: mod_base = OTHER; note = 2'-O-methylcytidine-3'-phosphate
  modified_base 17: mod_base = OTHER; note = 2'-O-methyluridine-3'-phosphate
  modified_base 18: mod_base = OTHER; note = 2'-O-methylguanosine-3'-phosphate
  modified_base 19: mod_base = OTHER; note = 2'-O-methylcytidine-3'-phosphate
  modified_base 20: mod_base = OTHER; note = 2'-O-methyluridine-3'-phosphate
  modified_base 21: mod_base = OTHER; note = 2'-O-methyluridine-3'-phosphate ((2S,4R)-1-[29-[[2-(acetylamino)-2-deoxy-beta-D-galactopyra nosyl]oxy]-14,14-bis[[3-[[3-[[5-[[2-(acetylamino)-2-deoxy-b eta-D-galactopyranosyl]oxy]-1-oxopentyl]amino]propyl]amino] -3-oxopropoxy]methyl]-1,12,19,25-tetraoxo-16-oxa-13,20,24-t riazanonacos-1-yl]-4-hydroxy-2-pyrrolidinyl)methyl ester
catccctagaggcagctgctt

SEQ ID NO: 476 - RNA, 23 nt, synthetic construct
  source 1..23: mol_type = other RNA
  modified_base 1: mod_base = OTHER; note = 2'-O-methyladenosine-3'-phosphorothioate
  modified_base 2: mod_base = OTHER; note = 2'-deoxy-2'-fluoroadenosine-3'-phosphorothioate
  modified_base 3: mod_base = OTHER; note = 2'-O-methylguanosine-3'-phosphate
  modified_base 4: mod_base = OTHER; note = 2'-O-methylcytidine-3'-phosphate
  modified_base 5: mod_base = OTHER; note = 2'-O-methyladenosine-3'-phosphate
  modified_base 6: mod_base = OTHER; note = 2'-deoxy-2'-fluoroguanosine-3'-phosphate
  modified_base 7: mod_base = OTHER; note = 2'-O-methylcytidine-3'-phosphate
  modified_base 8: mod_base = OTHER; note = 2'-deoxy-2'-fluorouridine-3'-phosphate
  modified_base 9: mod_base = OTHER; note = 2'-deoxy-2'-fluoroguanosine-3'-phosphate
  modified_base 10: mod_base = OTHER; note = 2'-O-methylcytidine-3'-phosphate
  modified_base 11: mod_base = OTHER; note = 2'-O-methylcytidine-3'-phosphate
  modified_base 12: mod_base = OTHER; note = 2'-O-methyluridine-3'-phosphate
  modified_base 13: mod_base = OTHER; note = 2'-O-methylcytidine-3'-phosphate
  modified_base 14: mod_base = OTHER; note = 2'-deoxy-2'-fluorouridine-3'-phosphate
  modified_base 15: mod_base = OTHER; note = 2'-O-methyladenosine-3'-phosphate
  modified_base 16: mod_base = OTHER; note = 2'-deoxy-2'-fluoroguanosine-3'-phosphate
  modified_base 17: mod_base = OTHER; note = 2'-O-methylguanosine-3'-phosphate
  modified_base 18: mod_base = OTHER; note = 2'-O-methylguanosine-3'-phosphate
  modified_base 19: mod_base = OTHER; note = 2'-O-methyladenosine-3'-phosphate
  modified_base 20: mod_base = OTHER; note = 2'-O-methyluridine-3'-phosphate
  modified_base 21: mod_base = OTHER; note = 2'-O-methylguanosine-3'-phosphorothioate
  modified_base 22: mod_base = OTHER; note = 2'-O-methyladenosine-3'-phosphorothioate
  modified_base 23: mod_base = OTHER; note = 2'-O-methyladenosine
aagcagctgcctctagggatgaa

SEQ ID NO: 477 - RNA, 23 nt, synthetic construct
  source 1..23: mol_type = other RNA
ttcatccctagaggcagctgctc

SEQ ID NO: 478 - RNA, 21 nt, synthetic construct
  source 1..21: mol_type = other RNA
  modified_base 1: mod_base = OTHER; note = 2'-O-methylcytidine-3'-phosphorothioate
  modified_base 2: mod_base = OTHER; note = 2'-O-methyluridine-3'-phosphorothioate
  modified_base 3: mod_base = OTHER; note = 2'-O-methylguanosine-3'-phosphate
  modified_base 4: mod_base = OTHER; note = 2'-O-methylcytidine-3'-phosphate
  modified_base 5: mod_base = OTHER; note = 2'-O-methylcytidine-3'-phosphate
  modified_base 6: mod_base = OTHER; note = 2'-O-methyluridine-3'-phosphate
  modified_base 7: mod_base = OTHER; note = 2'-deoxy-2'-fluoroguanosine-3'-phosphate
  modified_base 8: mod_base = OTHER; note = 2'-O-methyladenosine-3'-phosphate
  modified_base 9: mod_base = OTHER; note = 2'-deoxy-2'-fluoroguanosine-3'-phosphate
  modified_base 10: mod_base = OTHER; note = 2'-deoxy-2'-fluoroadenosine-3'-phosphate
  modified_base 11: mod_base = OTHER; note = 2'-deoxy-2'-fluorocytidine-3'-phosphate
  modified_base 12: mod_base = OTHER; note = 2'-O-methylcytidine-3'-phosphate
  modified_base 13: mod_base = OTHER; note = 2'-O-methyluridine-3'-phosphate
  modified_base 14: mod_base = OTHER; note = 2'-O-methylcytidine-3'-phosphate
  modified_base 15: mod_base = OTHER; note = 2'-O-methyladenosine-3'-phosphate
  modified_base 16: mod_base = OTHER; note = 2'-O-methyladenosine-3'-phosphate
  modified_base 17: mod_base = OTHER; note = 2'-O-methyluridine-3'-phosphate
  modified_base 18: mod_base = OTHER; note = 2'-O-methyladenosine-3'-phosphate
  modified_base 19: mod_base = OTHER; note = 2'-O-methylcytidine-3'-phosphate
  modified_base 20: mod_base = OTHER; note = 2'-O-methylcytidine-3'-phosphate
  modified_base 21: mod_base = OTHER; note = 2'-O-methyluridine-3'-phosphate ((2S,4R)-1-[29-[[2-(acetylamino)-2-deoxy-beta-D-galactopyra nosyl]oxy]-14,14-bis[[3-[[3-[[5-[[2-(acetylamino)-2-deoxy-b eta-D-galactopyranosyl]oxy]-1-oxopentyl]amino]propyl]amino] -3-oxopropoxy]methyl]-1,12,19,25-tetraoxo-16-oxa-13,20,24-t riazanonacos-1-yl]-4-hydroxy-2-pyrrolidinyl)methyl ester
ctgcctgagacctcaatacct

SEQ ID NO: 479 - RNA, 23 nt, synthetic construct
  source 1..23: mol_type = other RNA
  modified_base 1: mod_base = OTHER; note = 2'-O-methyladenosine-3'-phosphorothioate
  modified_base 2: mod_base = OTHER; note = 2'-deoxy-2'-fluoroguanosine-3'-phosphorothioate
  modified_base 3: mod_base = OTHER; note = 2'-O-methylguanosine-3'-phosphate
  modified_base 4: mod_base = OTHER; note = 2'-O-methyluridine-3'-phosphate
  modified_base 5: mod_base = OTHER; note = 2'-O-methyladenosine-3'-phosphate
  modified_base 6: mod_base = OTHER; note = 2'-deoxy-2'-fluorouridine-3'-phosphate
  modified_base 7: mod_base = OTHER; note = 2'-O-methyluridine-3'-phosphate
  modified_base 8: mod_base = OTHER; note = 2'-deoxy-2'-fluoroguanosine-3'-phosphate
  modified_base 9: mod_base = OTHER; note = 2'-deoxy-2'-fluoroadenosine-3'-phosphate
  modified_base 10: mod_base = OTHER; note = 2'-O-methylguanosine-3'-phosphate
  modified_base 11: mod_base = OTHER; note = 2'-O-methylguanosine-3'-phosphate
  modified_base 12: mod_base = OTHER; note = 2'-O-methyluridine-3'-phosphate
  modified_base 13: mod_base = OTHER; note = 2'-O-methylcytidine-3'-phosphate
  modified_base 14: mod_base = OTHER; note = 2'-deoxy-2'-fluorouridine-3'-phosphate
  modified_base 15: mod_base = OTHER; note = 2'-O-methylcytidine-3'-phosphate
  modified_base 16: mod_base = OTHER; note = 2'-deoxy-2'-fluoroadenosine-3'-phosphate
  modified_base 17: mod_base = OTHER; note = 2'-O-methylguanosine-3'-phosphate
  modified_base 18: mod_base = OTHER; note = 2'-O-methylguanosine-3'-phosphate
  modified_base 19: mod_base = OTHER; note = 2'-O-methylcytidine-3'-phosphate
  modified_base 20: mod_base = OTHER; note = 2'-O-methyladenosine-3'-phosphate
  modified_base 21: mod_base = OTHER; note = 2'-O-methylguanosine-3'-phosphorothioate
  modified_base 22: mod_base = OTHER; note = 2'-O-methylcytidine-3'-phosphorothioate
  modified_base 23: mod_base = OTHER; note = 2'-O-methylcytidine
aggtattgaggtctcaggcagcc

SEQ ID NO: 480 - RNA, 23 nt, synthetic construct
  source 1..23: mol_type = other RNA
ggctgcctgagacctcaataccc

SEQ ID NO: 481 - RNA, 21 nt, synthetic construct
  source 1..21: mol_type = other RNA
  modified_base 1: mod_base = OTHER; note = 2'-O-methyladenosine-3'-phosphorothioate
  modified_base 2: mod_base = OTHER; note = 2'-O-methyladenosine-3'-phosphorothioate
  modified_base 3: mod_base = OTHER; note = 2'-O-methyladenosine-3'-phosphate
  modified_base 4: mod_base = OTHER; note = 2'-O-methylguanosine-3'-phosphate
  modified_base 5: mod_base = OTHER; note = 2'-O-methylcytidine-3'-phosphate
  modified_base 6: mod_base = OTHER; note = 2'-O-methyluridine-3'-phosphate
  modified_base 7: mod_base = OTHER; note = 2'-deoxy-2'-fluoroguanosine-3'-phosphate
  modified_base 8: mod_base = OTHER; note = 2'-O-methylguanosine-3'-phosphate
  modified_base 9: mod_base = OTHER; note = 2'-deoxy-2'-fluoroadenosine-3'-phosphate
  modified_base 10: mod_base = OTHER; note = 2'-deoxy-2'-fluorocytidine-3'-phosphate
  modified_base 11: mod_base = OTHER; note = 2'-deoxy-2'-fluoroadenosine-3'-phosphate
  modified_base 12: mod_base = OTHER; note = 2'-O-methyladenosine-3'-phosphate
  modified_base 13: mod_base = OTHER; note = 2'-O-methylguanosine-3'-phosphate
  modified_base 14: mod_base = OTHER; note = 2'-O-methyladenosine-3'-phosphate
  modified_base 15: mod_base = OTHER; note = 2'-O-methyladenosine-3'-phosphate
  modified_base 16: mod_base = OTHER; note = 2'-O-methylguanosine-3'-phosphate
  modified_base 17: mod_base = OTHER; note = 2'-O-methylcytidine-3'-phosphate
  modified_base 18: mod_base = OTHER; note = 2'-O-methyluridine-3'-phosphate
  modified_base 19: mod_base = OTHER; note = 2'-O-methylguanosine-3'-phosphate
  modified_base 20: mod_base = OTHER; note = 2'-O-methylcytidine-3'-phosphate
  modified_base 21: mod_base = OTHER; note = 2'-O-methyluridine-3'-phosphate ((2S,4R)-1-[29-[[2-(acetylamino)-2-deoxy-beta-D-galactopyra nosyl]oxy]-14,14-bis[[3-[[3-[[5-[[2-(acetylamino)-2-deoxy-b eta-D-galactopyranosyl]oxy]-1-oxopentyl]amino]propyl]amino] -3-oxopropoxy]methyl]-1,12,19,25-tetraoxo-16-oxa-13,20,24-t riazanonacos-1-yl]-4-hydroxy-2-pyrrolidinyl)methyl ester
aaagctggacaagaagctgct

SEQ ID NO: 482 - RNA, 23 nt, synthetic construct
  source 1..23: mol_type = other RNA
  modified_base 1: mod_base = OTHER; note = 2'-O-methyladenosine-3'-phosphorothioate
  modified_base 2: mod_base = OTHER; note = 2'-deoxy-2'-fluoroguanosine-3'-phosphorothioate
  modified_base 3: mod_base = OTHER; note = 2'-O-methylcytidine-3'-phosphate
  modified_base 4: mod_base = OTHER; note = 2'-O-methyladenosine-3'-phosphate
  modified_base 5: mod_base = OTHER; note = 2'-O-methylguanosine-3'-phosphate
  modified_base 6: mod_base = OTHER; note = 2'-deoxy-2'-fluorocytidine-3'-phosphate
  modified_base 7: mod_base = OTHER; note = 2'-O-methyluridine-3'-phosphate
  modified_base 8: mod_base = OTHER; note = 2'-deoxy-2'-fluorouridine-3'-phosphate
  modified_base 9: mod_base = OTHER; note = 2'-deoxy-2'-fluorocytidine-3'-phosphate
  modified_base 10: mod_base = OTHER; note = 2'-O-methyluridine-3'-phosphate
  modified_base 11: mod_base = OTHER; note = 2'-O-methyluridine-3'-phosphate
  modified_base 12: mod_base = OTHER; note = 2'-O-methylguanosine-3'-phosphate
  modified_base 13: mod_base = OTHER; note = 2'-O-methyluridine-3'-phosphate
  modified_base 14: mod_base = OTHER; note = 2'-deoxy-2'-fluorocytidine-3'-phosphate
  modified_base 15: mod_base = OTHER; note = 2'-O-methylcytidine-3'-phosphate
  modified_base 16: mod_base = OTHER; note = 2'-deoxy-2'-fluoroadenosine-3'-phosphate
  modified_base 17: mod_base = OTHER; note = 2'-O-methylguanosine-3'-phosphate
  modified_base 18: mod_base = OTHER; note = 2'-O-methylcytidine-3'-phosphate
  modified_base 19: mod_base = OTHER; note = 2'-O-methyluridine-3'-phosphate
  modified_base 20: mod_base = OTHER; note = 2'-O-methyluridine-3'-phosphate
  modified_base 21: mod_base = OTHER; note = 2'-O-methyluridine-3'-phosphorothioate
  modified_base 22: mod_base = OTHER; note = 2'-O-methyladenosine-3'-phosphorothioate
  modified_base 23: mod_base = OTHER; note = 2'-O-methyluridine
agcagcttcttgtccagctttat

SEQ ID NO: 483 - RNA, 23 nt, synthetic construct
  source 1..23: mol_type = other RNA
ataaagctggacaagaagctgct

SEQ ID NO: 484 - RNA, 21 nt, synthetic construct
  source 1..21: mol_type = other RNA
  modified_base 1: mod_base = OTHER; note = 2'-O-methyluridine-3'-phosphorothioate
  modified_base 2: mod_base = OTHER; note = 2'-O-methyluridine-3'-phosphorothioate
  modified_base 3: mod_base = OTHER; note = 2'-O-methylcytidine-3'-phosphate
  modified_base 4: mod_base = OTHER; note = 2'-O-methylcytidine-3'-phosphate
  modified_base 5: mod_base = OTHER; note = 2'-O-methylcytidine-3'-phosphate
  modified_base 6: mod_base = OTHER; note = 2'-O-methyluridine-3'-phosphate
  modified_base 7: mod_base = OTHER; note = 2'-deoxy-2'-fluoroguanosine-3'-phosphate
  modified_base 8: mod_base = OTHER; note = 2'-O-methyladenosine-3'-phosphate
  modified_base 9: mod_base = OTHER; note = 2'-deoxy-2'-fluoroadenosine-3'-phosphate
  modified_base 10: mod_base = OTHER; note = 2'-deoxy-2'-fluoroadenosine-3'-phosphate
  modified_base 11: mod_base = OTHER; note = 2'-deoxy-2'-fluoroguanosine-3'-phosphate
  modified_base 12: mod_base = OTHER; note = 2'-O-methyladenosine-3'-phosphate
  modified_base 13: mod_base = OTHER; note = 2'-O-methylcytidine-3'-phosphate
  modified_base 14: mod_base = OTHER; note = 2'-O-methyluridine-3'-phosphate
  modified_base 15: mod_base = OTHER; note = 2'-O-methyladenosine-3'-phosphate
  modified_base 16: mod_base = OTHER; note = 2'-O-methylcytidine-3'-phosphate
  modified_base 17: mod_base = OTHER; note = 2'-O-methyluridine-3'-phosphate
  modified_base 18: mod_base = OTHER; note = 2'-O-methylguanosine-3'-phosphate
  modified_base 19: mod_base = OTHER; note = 2'-O-methylguanosine-3'-phosphate
  modified_base 20: mod_base = OTHER; note = 2'-O-methyladenosine-3'-phosphate
  modified_base 21: mod_base = OTHER; note = 2'-O-methyluridine-3'-phosphate ((2S,4R)-1-[29-[[2-(acetylamino)-2-deoxy-beta-D-galactopyra nosyl]oxy]-14,14-bis[[3-[[3-[[5-[[2-(acetylamino)-2-deoxy-b eta-D-galactopyranosyl]oxy]-1-oxopentyl]amino]propyl]amino] -3-oxopropoxy]methyl]-1,12,19,25-tetraoxo-16-oxa-13,20,24-t riazanonacos-1-yl]-4-hydroxy-2-pyrrolidinyl)methyl ester
ttccctgaaagactactggat

SEQ ID NO: 485 - RNA, 23 nt, synthetic construct
  source 1..23: mol_type = other RNA
  modified_base 1: mod_base = OTHER; note = 2'-O-methyladenosine-3'-phosphorothioate
  modified_base 2: mod_base = OTHER; note = 2'-deoxy-2'-fluorouridine-3'-phosphorothioate
  modified_base 3: mod_base = OTHER; note = 2'-O-methylcytidine-3'-phosphate
  modified_base 4: mod_base = OTHER; note = 2'-O-methylcytidine-3'-phosphate
  modified_base 5: mod_base = OTHER; note = 2'-O-methyladenosine-3'-phosphate
  modified_base 6: mod_base = OTHER; note = 2'-deoxy-2'-fluoroguanosine-3'-phosphate
  modified_base 7: mod_base = OTHER; note = 2'-O-methyluridine-3'-phosphate
  modified_base 8: mod_base = OTHER; note = 2'-deoxy-2'-fluoroadenosine-3'-phosphate
  modified_base 9: mod_base = OTHER; note = 2'-deoxy-2'-fluoroguanosine-3'-phosphate
  modified_base 10: mod_base = OTHER; note = 2'-O-methyluridine-3'-phosphate
  modified_base 11: mod_base = OTHER; note = 2'-O-methylcytidine-3'-phosphate
  modified_base 12: mod_base = OTHER; note = 2'-O-methyluridine-3'-phosphate
  modified_base 13: mod_base = OTHER; note = 2'-O-methyluridine-3'-phosphate
  modified_base 14: mod_base = OTHER; note = 2'-deoxy-2'-fluorouridine-3'-phosphate
  modified_base 15: mod_base = OTHER; note = 2'-O-methylcytidine-3'-phosphate
  modified_base 16: mod_base = OTHER; note = 2'-deoxy-2'-fluoroadenosine-3'-phosphate
  modified_base 17: mod_base = OTHER; note = 2'-O-methylguanosine-3'-phosphate
  modified_base 18: mod_base = OTHER; note = 2'-O-methylguanosine-3'-phosphate
  modified_base 19: mod_base = OTHER; note = 2'-O-methylguanosine-3'-phosphate
  modified_base 20: mod_base = OTHER; note = 2'-O-methyladenosine-3'-phosphate
  modified_base 21: mod_base = OTHER; note = 2'-O-methyladenosine-3'-phosphorothioate
  modified_base 22: mod_base = OTHER; note = 2'-O-methylcytidine-3'-phosphorothioate
  modified_base 23: mod_base = OTHER; note = 2'-O-methyluridine
atccagtagtctttcagggaact

SEQ ID NO: 486 - RNA, 23 nt, synthetic construct
  source 1..23: mol_type = other RNA
agttccctgaaagactactggag

SEQ ID NO: 487 - RNA, 21 nt, synthetic construct
  source 1..21: mol_type = other RNA
  modified_base 1: mod_base = OTHER; note = 2'-O-methyluridine-3'-phosphorothioate
  modified_base 2: mod_base = OTHER; note = 2'-O-methyladenosine-3'-phosphorothioate
  modified_base 3: mod_base = OTHER; note = 2'-O-methylguanosine-3'-phosphate
  modified_base 4: mod_base = OTHER; note = 2'-O-methylguanosine-3'-phosphate
  modified_base 5: mod_base = OTHER; note = 2'-O-methyluridine-3'-phosphate
  modified_base 6: mod_base = OTHER; note = 2'-O-methyluridine-3'-phosphate
  modified_base 7: mod_base = OTHER; note = 2'-deoxy-2'-fluoroguanosine-3'-phosphate
  modified_base 8: mod_base = OTHER; note = 2'-O-methylcytidine-3'-phosphate
  modified_base 9: mod_base = OTHER; note = 2'-deoxy-2'-fluorouridine-3'-phosphate
  modified_base 10: mod_base = OTHER; note = 2'-deoxy-2'-fluorouridine-3'-phosphate
  modified_base 11: mod_base = OTHER; note = 2'-deoxy-2'-fluoroadenosine-3'-phosphate
  modified_base 12: mod_base = OTHER; note = 2'-O-methyladenosine-3'-phosphate
  modified_base 13: mod_base = OTHER; note = 2'-O-methyladenosine-3'-phosphate
  modified_base 14: mod_base = OTHER; note = 2'-O-methyladenosine-3'-phosphate
  modified_base 15: mod_base = OTHER; note = 2'-O-methylguanosine-3'-phosphate
  modified_base 16: mod_base = OTHER; note = 2'-O-methylguanosine-3'-phosphate
  modified_base 17: mod_base = OTHER; note = 2'-O-methylguanosine-3'-phosphate
  modified_base 18: mod_base = OTHER; note = 2'-O-methyladenosine-3'-phosphate
  modified_base 19: mod_base = OTHER; note = 2'-O-methylcytidine-3'-phosphate
  modified_base 20: mod_base = OTHER; note = 2'-O-methyladenosine-3'-phosphate
  modified_base 21: mod_base = OTHER; note = 2'-O-methyluridine-3'-phosphate ((2S,4R)-1-[29-[[2-(acetylamino)-2-deoxy-beta-D-galactopyra nosyl]oxy]-14,14-bis[[3-[[3-[[5-[[2-(acetylamino)-2-deoxy-b eta-D-galactopyranosyl]oxy]-1-oxopentyl]amino]propyl]amino] -3-oxopropoxy]methyl]-1,12,19,25-tetraoxo-16-oxa-13,20,24-t riazanonacos-1-yl]-4-hydroxy-2-pyrrolidinyl)methyl ester
taggttgcttaaaagggacat

SEQ ID NO: 488 - RNA, 23 nt, synthetic construct
  source 1..23: mol_type = other RNA
  modified_base 1: mod_base = OTHER; note = 2'-O-methyladenosine-3'-phosphorothioate
  modified_base 2: mod_base = OTHER; note = 2'-deoxy-2'-fluorouridine-3'-phosphorothioate
  modified_base 3: mod_base = OTHER; note = 2'-O-methylguanosine-3'-phosphate
  modified_base 4: mod_base = OTHER; note = 2'-O-methyluridine-3'-phosphate
  modified_base 5: mod_base = OTHER; note = 2'-O-methylcytidine-3'-phosphate
  modified_base 6: mod_base = OTHER; note = 2'-deoxy-2'-fluorocytidine-3'-phosphate
  modified_base 7: mod_base = OTHER; note = 2'-O-methylcytidine-3'-phosphate
  modified_base 8: mod_base = OTHER; note = 2'-deoxy-2'-fluorouridine-3'-phosphate
  modified_base 9: mod_base = OTHER; note = 2'-deoxy-2'-fluorouridine-3'-phosphate
  modified_base 10: mod_base = OTHER; note = 2'-O-methyluridine-3'-phosphate
  modified_base 11: mod_base = OTHER; note = 2'-O-methyluridine-3'-phosphate
  modified_base 12: mod_base = OTHER; note = 2'-O-methyladenosine-3'-phosphate
  modified_base 13: mod_base = OTHER; note = 2'-O-methyladenosine-3'-phosphate
  modified_base 14: mod_base = OTHER; note = 2'-deoxy-2'-fluoroguanosine-3'-phosphate
  modified_base 15: mod_base = OTHER; note = 2'-O-methylcytidine-3'-phosphate
  modified_base 16: mod_base = OTHER; note = 2'-deoxy-2'-fluoroadenosine-3'-phosphate
  modified_base 17: mod_base = OTHER; note = 2'-O-methyladenosine-3'-phosphate
  modified_base 18: mod_base = OTHER; note = 2'-O-methylcytidine-3'-phosphate
  modified_base 19: mod_base = OTHER; note = 2'-O-methylcytidine-3'-phosphate
  modified_base 20: mod_base = OTHER; note = 2'-O-methyluridine-3'-phosphate
  modified_base 21: mod_base = OTHER; note = 2'-O-methyladenosine-3'-phosphorothioate
  modified_base 22: mod_base = OTHER; note = 2'-O-methylcytidine-3'-phosphorothioate
  modified_base 23: mod_base = OTHER; note = 2'-O-methyladenosine
atgtcccttttaagcaacctaca

SEQ ID NO: 489 - RNA, 23 nt, synthetic construct
  source 1..23: mol_type = other RNA
tgtaggttgcttaaaagggacag

SEQ ID NO: 490 - RNA, 21 nt, synthetic construct
  source 1..21: mol_type = other RNA
  modified_base 1: mod_base = OTHER; note = 2'-O-methylcytidine-3'-phosphorothioate
  modified_base 2: mod_base = OTHER; note = 2'-O-methyladenosine-3'-phosphorothioate
  modified_base 3: mod_base = OTHER; note = 2'-O-methylcytidine-3'-phosphate
  modified_base 4: mod_base = OTHER; note = 2'-O-methylcytidine-3'-phosphate
  modified_base 5: mod_base = OTHER; note = 2'-O-methyladenosine-3'-phosphate
  modified_base 6: mod_base = OTHER; note = 2'-O-methyladenosine-3'-phosphate
  modified_base 7: mod_base = OTHER; note = 2'-deoxy-2'-fluoroguanosine-3'-phosphate
  modified_base 8: mod_base = OTHER; note = 2'-O-methyladenosine-3'-phosphate
  modified_base 9: mod_base = OTHER; note = 2'-deoxy-2'-fluorocytidine-3'-phosphate
  modified_base 10: mod_base = OTHER; note = 2'-deoxy-2'-fluorocytidine-3'-phosphate
  modified_base 11: mod_base = OTHER; note = 2'-deoxy-2'-fluoroguanosine-3'-phosphate
  modified_base 12: mod_base = OTHER; note = 2'-O-methylcytidine-3'-phosphate
  modified_base 13: mod_base = OTHER; note = 2'-O-methylcytidine-3'-phosphate
  modified_base 14: mod_base = OTHER; note = 2'-O-methyladenosine-3'-phosphate
  modified_base 15: mod_base = OTHER; note = 2'-O-methyladenosine-3'-phosphate
  modified_base 16: mod_base = OTHER; note = 2'-O-methylguanosine-3'-phosphate
  modified_base 17: mod_base = OTHER; note = 2'-O-methylguanosine-3'-phosphate
  modified_base 18: mod_base = OTHER; note = 2'-O-methyladenosine-3'-phosphate
  modified_base 19: mod_base = OTHER; note = 2'-O-methyluridine-3'-phosphate
  modified_base 20: mod_base = OTHER; note = 2'-O-methylguanosine-3'-phosphate
  modified_base 21: mod_base = OTHER; note = 2'-O-methyluridine-3'-phosphate ((2S,4R)-1-[29-[[2-(acetylamino)-2-deoxy-beta-D-galactopyra nosyl]oxy]-14,14-bis[[3-[[3-[[5-[[2-(acetylamino)-2-deoxy-b eta-D-galactopyranosyl]oxy]-1-oxopentyl]amino]propyl]amino] -3-oxopropoxy]methyl]-1,12,19,25-tetraoxo-16-oxa-13,20,24-t riazanonacos-1-yl]-4-hydroxy-2-pyrrolidinyl)methyl ester
caccaagaccgccaaggatgt

SEQ ID NO: 491 - RNA, 23 nt, synthetic construct
  source 1..23: mol_type = other RNA
  modified_base 1: mod_base = OTHER; note = 2'-O-methyladenosine-3'-phosphorothioate
  modified_base 2: mod_base = OTHER; note = 2'-deoxy-2'-fluorocytidine-3'-phosphorothioate
  modified_base 3: mod_base = OTHER; note = 2'-O-methyladenosine-3'-phosphate
  modified_base 4: mod_base = OTHER; note = 2'-O-methyluridine-3'-phosphate
  modified_base 5: mod_base = OTHER; note = 2'-O-methylcytidine-3'-phosphate
  modified_base 6: mod_base = OTHER; note = 2'-deoxy-2'-fluorocytidine-3'-phosphate
  modified_base 7: mod_base = OTHER; note = 2'-O-methyluridine-3'-phosphate
  modified_base 8: mod_base = OTHER; note = 2'-deoxy-2'-fluorouridine-3'-phosphate
  modified_base 9: mod_base = OTHER; note = 2'-deoxy-2'-fluoroguanosine-3'-phosphate
  modified_base 10: mod_base = OTHER; note = 2'-O-methylguanosine-3'-phosphate
  modified_base 11: mod_base = OTHER; note = 2'-O-methylcytidine-3'-phosphate
  modified_base 12: mod_base = OTHER; note = 2'-O-methylguanosine-3'-phosphate
  modified_base 13: mod_base = OTHER; note = 2'-O-methylguanosine-3'-phosphate
  modified_base 14: mod_base = OTHER; note = 2'-deoxy-2'-fluorouridine-3'-phosphate
  modified_base 15: mod_base = OTHER; note = 2'-O-methylcytidine-3'-phosphate
  modified_base 16: mod_base = OTHER; note = 2'-deoxy-2'-fluorouridine-3'-phosphate
  modified_base 17: mod_base = OTHER; note = 2'-O-methyluridine-3'-phosphate
  modified_base 18: mod_base = OTHER; note = 2'-O-methylguanosine-3'-phosphate
  modified_base 19: mod_base = OTHER; note = 2'-O-methylguanosine-3'-phosphate
  modified_base 20: mod_base = OTHER; note = 2'-O-methyluridine-3'-phosphate
  modified_base 21: mod_base = OTHER; note = 2'-O-methylguanosine-3'-phosphorothioate
  modified_base 22: mod_base = OTHER; note = 2'-O-methylguanosine-3'-phosphorothioate
  modified_base 23: mod_base = OTHER; note = 2'-O-methylcytidine
acatccttggcggtcttggtggc

SEQ ID NO: 492 - RNA, 23 nt, synthetic construct
  source 1..23: mol_type = other RNA
gccaccaagaccgccaaggatgc

SEQ ID NO: 493 - RNA, 21 nt, synthetic construct
  source 1..21: mol_type = other RNA
  modified_base 1: mod_base = OTHER; note = 2'-O-methyladenosine-3'-phosphorothioate
  modified_base 2: mod_base = OTHER; note = 2'-O-methylguanosine-3'-phosphorothioate
  modified_base 3: mod_base = OTHER; note = 2'-O-methylguanosine-3'-phosphate
  modified_base 4: mod_base = OTHER; note = 2'-O-methyluridine-3'-phosphate
  modified_base 5: mod_base = OTHER; note = 2'-O-methyluridine-3'-phosphate
  modified_base 6: mod_base = OTHER; note = 2'-O-methylguanosine-3'-phosphate
  modified_base 7: mod_base = OTHER; note = 2'-deoxy-2'-fluorocytidine-3'-phosphate
  modified_base 8: mod_base = OTHER; note = 2'-O-methyluridine-3'-phosphate
  modified_base 9: mod_base = OTHER; note = 2'-deoxy-2'-fluorouridine-3'-phosphate
  modified_base 10: mod_base = OTHER; note = 2'-deoxy-2'-fluoroadenosine-3'-phosphate
  modified_base 11: mod_base = OTHER; note = 2'-deoxy-2'-fluoroadenosine-3'-phosphate
  modified_base 12: mod_base = OTHER; note = 2'-O-methyladenosine-3'-phosphate
  modified_base 13: mod_base = OTHER; note = 2'-O-methyladenosine-3'-phosphate
  modified_base 14: mod_base = OTHER; note = 2'-O-methylguanosine-3'-phosphate
  modified_base 15: mod_base = OTHER; note = 2'-O-methylguanosine-3'-phosphate
  modified_base 16: mod_base = OTHER; note = 2'-O-methylguanosine-3'-phosphate
  modified_base 17: mod_base = OTHER; note = 2'-O-methyladenosine-3'-phosphate
  modified_base 18: mod_base = OTHER; note = 2'-O-methylcytidine-3'-phosphate
  modified_base 19: mod_base = OTHER; note = 2'-O-methyladenosine-3'-phosphate
  modified_base 20: mod_base = OTHER; note = 2'-O-methylguanosine-3'-phosphate
  modified_base 21: mod_base = OTHER; note = 2'-O-methyluridine-3'-phosphate ((2S,4R)-1-[29-[[2-(acetylamino)-2-deoxy-beta-D-galactopyra nosyl]oxy]-14,14-bis[[3-[[3-[[5-[[2-(acetylamino)-2-deoxy-b eta-D-galactopyranosyl]oxy]-1-oxopentyl]amino]propyl]amino] -3-oxopropoxy]methyl]-1,12,19,25-tetraoxo-16-oxa-13,20,24-t riazanonacos-1-yl]-4-hydroxy-2-pyrrolidinyl)methyl ester
aggttgcttaaaagggacagt

SEQ ID NO: 494 - RNA, 23 nt, synthetic construct
  source 1..23: mol_type = other RNA
  modified_base 1: mod_base = OTHER; note = 2'-O-methyladenosine-3'-phosphorothioate
  modified_base 2: mod_base = OTHER; note = 2'-deoxy-2'-fluorocytidine-3'-phosphorothioate
  modified_base 3: mod_base = OTHER; note = 2'-O-methyluridine-3'-phosphate
  modified_base 4: mod_base = OTHER; note = 2'-O-methylguanosine-3'-phosphate
  modified_base 5: mod_base = OTHER; note = 2'-O-methyluridine-3'-phosphate
  modified_base 6: mod_base = OTHER; note = 2'-deoxy-2'-fluorocytidine-3'-phosphate
  modified_base 7: mod_base = OTHER; note = 2'-O-methylcytidine-3'-phosphate
  modified_base 8: mod_base = OTHER; note = 2'-deoxy-2'-fluorocytidine-3'-phosphate
  modified_base 9: mod_base = OTHER; note = 2'-deoxy-2'-fluorouridine-3'-phosphate
  modified_base 10: mod_base = OTHER; note = 2'-O-methyluridine-3'-phosphate
  modified_base 11: mod_base = OTHER; note = 2'-O-methyluridine-3'-phosphate
  modified_base 12: mod_base = OTHER; note = 2'-O-methyluridine-3'-phosphate
  modified_base 13: mod_base = OTHER; note = 2'-O-methyladenosine-3'-phosphate
  modified_base 14: mod_base = OTHER; note = 2'-deoxy-2'-fluoroadenosine-3'-phosphate
  modified_base 15: mod_base = OTHER; note = 2'-O-methylguanosine-3'-phosphate
  modified_base 16: mod_base = OTHER; note = 2'-deoxy-2'-fluorocytidine-3'-phosphate
  modified_base 17: mod_base = OTHER; note = 2'-O-methyladenosine-3'-phosphate
  modified_base 18: mod_base = OTHER; note = 2'-O-methyladenosine-3'-phosphate
  modified_base 19: mod_base = OTHER; note = 2'-O-methylcytidine-3'-phosphate
  modified_base 20: mod_base = OTHER; note = 2'-O-methylcytidine-3'-phosphate
  modified_base 21: mod_base = OTHER; note = 2'-O-methyluridine-3'-phosphorothioate
  modified_base 22: mod_base = OTHER; note = 2'-O-methyladenosine-3'-phosphorothioate
  modified_base 23: mod_base = OTHER; note = 2'-O-methylcytidine
actgtcccttttaagcaacctac

SEQ ID NO: 495 - RNA, 23 nt, synthetic construct
  source 1..23: mol_type = other RNA
gtaggttgcttaaaagggacagt

SEQ ID NO: 496 - RNA, 21 nt, synthetic construct
  source 1..21: mol_type = other RNA
  modified_base 1: mod_base = OTHER; note = 2'-O-methyladenosine-3'-phosphorothioate
  modified_base 2: mod_base = OTHER; note = 2'-O-methylguanosine-3'-phosphorothioate
  modified_base 3: mod_base = OTHER; note = 2'-O-methylcytidine-3'-phosphate
  modified_base 4: mod_base = OTHER; note = 2'-O-methyluridine-3'-phosphate
  modified_base 5: mod_base = OTHER; note = 2'-O-methylguanosine-3'-phosphate
  modified_base 6: mod_base = OTHER; note = 2'-O-methylguanosine-3'-phosphate
  modified_base 7: mod_base = OTHER; note = 2'-deoxy-2'-fluoroadenosine-3'-phosphate
  modified_base 8: mod_base = OTHER; note = 2'-O-methylcytidine-3'-phosphate
  modified_base 9: mod_base = OTHER; note = 2'-deoxy-2'-fluoroadenosine-3'-phosphate
  modified_base 10: mod_base = OTHER; note = 2'-deoxy-2'-fluoroadenosine-3'-phosphate
  modified_base 11: mod_base = OTHER; note = 2'-deoxy-2'-fluoroguanosine-3'-phosphate
  modified_base 12: mod_base = OTHER; note = 2'-O-methyladenosine-3'-phosphate
  modified_base 13: mod_base = OTHER; note = 2'-O-methyladenosine-3'-phosphate
  modified_base 14: mod_base = OTHER; note = 2'-O-methylguanosine-3'-phosphate
  modified_base 15: mod_base = OTHER; note = 2'-O-methylcytidine-3'-phosphate
  modified_base 16: mod_base = OTHER; note = 2'-O-methyluridine-3'-phosphate
  modified_base 17: mod_base = OTHER; note = 2'-O-methylguanosine-3'-phosphate
  modified_base 18: mod_base = OTHER; note = 2'-O-methylcytidine-3'-phosphate
  modified_base 19: mod_base = OTHER; note = 2'-O-methyluridine-3'-phosphate
  modified_base 20: mod_base = OTHER; note = 2'-O-methyladenosine-3'-phosphate
  modified_base 21: mod_base = OTHER; note = 2'-O-methyluridine-3'-phosphate ((2S,4R)-1-[29-[[2-(acetylamino)-2-deoxy-beta-D-galactopyra nosyl]oxy]-14,14-bis[[3-[[3-[[5-[[2-(acetylamino)-2-deoxy-b eta-D-galactopyranosyl]oxy]-1-oxopentyl]amino]propyl]amino] -3-oxopropoxy]methyl]-1,12,19,25-tetraoxo-16-oxa-13,20,24-t riazanonacos-1-yl]-4-hydroxy-2-pyrrolidinyl)methyl ester
agctggacaagaagctgctat

SEQ ID NO: 497 - RNA, 23 nt, synthetic construct
  source 1..23: mol_type = other RNA
  modified_base 1: mod_base = OTHER; note = 2'-O-methyladenosine-3'-phosphorothioate
  modified_base 2: mod_base = OTHER; note = 2'-deoxy-2'-fluorouridine-3'-phosphorothioate
  modified_base 3: mod_base = OTHER; note = 2'-O-methyladenosine-3'-phosphate
  modified_base 4: mod_base = OTHER; note = 2'-O-methylguanosine-3'-phosphate
  modified_base 5: mod_base = OTHER; note = 2'-O-methylcytidine-3'-phosphate
  modified_base 6: mod_base = OTHER; note = 2'-deoxy-2'-fluoroadenosine-3'-phosphate
  modified_base 7: mod_base = OTHER; note = 2'-O-methylguanosine-3'-phosphate
  modified_base 8: mod_base = OTHER; note = 2'-deoxy-2'-fluorocytidine-3'-phosphate
  modified_base 9: mod_base = OTHER; note = 2'-deoxy-2'-fluorouridine-3'-phosphate
  modified_base 10: mod_base = OTHER; note = 2'-O-methyluridine-3'-phosphate
  modified_base 11: mod_base = OTHER; note = 2'-O-methylcytidine-3'-phosphate
  modified_base 12: mod_base = OTHER; note = 2'-O-methyluridine-3'-phosphate
  modified_base 13: mod_base = OTHER; note = 2'-O-methyluridine-3'-phosphate
  modified_base 14: mod_base = OTHER; note = 2'-deoxy-2'-fluoroguanosine-3'-phosphate
  modified_base 15: mod_base = OTHER; note = 2'-O-methyluridine-3'-phosphate
  modified_base 16: mod_base = OTHER; note = 2'-deoxy-2'-fluorocytidine-3'-phosphate
  modified_base 17: mod_base = OTHER; note = 2'-O-methylcytidine-3'-phosphate
  modified_base 18: mod_base = OTHER; note = 2'-O-methyladenosine-3'-phosphate
  modified_base 19: mod_base = OTHER; note = 2'-O-methylguanosine-3'-phosphate
  modified_base 20: mod_base = OTHER; note = 2'-O-methylcytidine-3'-phosphate
  modified_base 21: mod_base = OTHER; note = 2'-O-methyluridine-3'-phosphorothioate
  modified_base 22: mod_base = OTHER; note = 2'-O-methyluridine-3'-phosphorothioate
  modified_base 23: mod_base = OTHER; note = 2'-O-methyluridine
atagcagcttcttgtccagcttt

SEQ ID NO: 498 - RNA, 23 nt, synthetic construct
  source 1..23: mol_type = other RNA
aaagctggacaagaagctgctat

SEQ ID NO: 499 - RNA, 21 nt, synthetic construct
  source 1..21: mol_type = other RNA
  modified_base 1: mod_base = OTHER; note = 2'-O-methylcytidine-3'-phosphorothioate
  modified_base 2: mod_base = OTHER; note = 2'-O-methylcytidine-3'-phosphorothioate
  modified_base 3: mod_base = OTHER; note = 2'-O-methylcytidine-3'-phosphate
  modified_base 4: mod_base = OTHER; note = 2'-O-methyluridine-3'-phosphate
  modified_base 5: mod_base = OTHER; note = 2'-O-methyladenosine-3'-phosphate
  modified_base 6: mod_base = OTHER; note = 2'-O-methylguanosine-3'-phosphate
  modified_base 7: mod_base = OTHER; note = 2'-deoxy-2'-fluoroadenosine-3'-phosphate
  modified_base 8: mod_base = OTHER; note = 2'-O-methylguanosine-3'-phosphate
  modified_base 9: mod_base = OTHER; note = 2'-deoxy-2'-fluoroguanosine-3'-phosphate
  modified_base 10: mod_base = OTHER; note = 2'-deoxy-2'-fluorocytidine-3'-phosphate
  modified_base 11: mod_base = OTHER; note = 2'-deoxy-2'-fluoroadenosine-3'-phosphate
  modified_base 12: mod_base = OTHER; note = 2'-O-methylguanosine-3'-phosphate
  modified_base 13: mod_base = OTHER; note = 2'-O-methylcytidine-3'-phosphate
  modified_base 14: mod_base = OTHER; note = 2'-O-methyluridine-3'-phosphate
  modified_base 15: mod_base = OTHER; note = 2'-O-methylguanosine-3'-phosphate
  modified_base 16: mod_base = OTHER; note = 2'-O-methylcytidine-3'-phosphate
  modified_base 17: mod_base = OTHER; note = 2'-O-methyluridine-3'-phosphate
  modified_base 18: mod_base = OTHER; note = 2'-O-methylcytidine-3'-phosphate
  modified_base 19: mod_base = OTHER; note = 2'-O-methylcytidine-3'-phosphate
  modified_base 20: mod_base = OTHER; note = 2'-O-methyladenosine-3'-phosphate
  modified_base 21: mod_base = OTHER; note = 2'-O-methyluridine-3'-phosphate ((2S,4R)-1-[29-[[2-(acetylamino)-2-deoxy-beta-D-galactopyra nosyl]oxy]-14,14-bis[[3-[[3-[[5-[[2-(acetylamino)-2-deoxy-b eta-D-galactopyranosyl]oxy]-1-oxopentyl]amino]propyl]amino] -3-oxopropoxy]methyl]-1,12,19,25-tetraoxo-16-oxa-13,20,24-t riazanonacos-1-yl]-4-hydroxy-2-pyrrolidinyl)methyl ester
ccctagaggcagctgctccat

SEQ ID NO: 500 - RNA, 23 nt, synthetic construct
  source 1..23: mol_type = other RNA
  modified_base 1: mod_base = OTHER; note = 2'-O-methyladenosine-3'-phosphorothioate
  modified_base 2: mod_base = OTHER; note = 2'-deoxy-2'-fluorouridine-3'-phosphorothioate
  modified_base 3: mod_base = OTHER; note = 2'-O-methylguanosine-3'-phosphate
  modified_base 4: mod_base = OTHER; note = 2'-O-methylguanosine-3'-phosphate
  modified_base 5: mod_base = OTHER; note = 2'-O-methyladenosine-3'-phosphate
  modified_base 6: mod_base = OTHER; note = 2'-deoxy-2'-fluoroguanosine-3'-phosphate
  modified_base 7: mod_base = OTHER; note = 2'-O-methylcytidine-3'-phosphate
  modified_base 8: mod_base = OTHER; note = 2'-deoxy-2'-fluoroadenosine-3'-phosphate
  modified_base 9: mod_base = OTHER; note = 2'-deoxy-2'-fluoroguanosine-3'-phosphate
  modified_base 10: mod_base = OTHER; note = 2'-O-methylcytidine-3'-phosphate
  modified_base 11: mod_base = OTHER; note = 2'-O-methyluridine-3'-phosphate
  modified_base 12: mod_base = OTHER; note = 2'-O-methylguanosine-3'-phosphate
  modified_base 13: mod_base = OTHER; note = 2'-O-methylcytidine-3'-phosphate
  modified_base 14: mod_base = OTHER; note = 2'-deoxy-2'-fluorocytidine-3'-phosphate
  modified_base 15: mod_base = OTHER; note = 2'-O-methyluridine-3'-phosphate
  modified_base 16: mod_base = OTHER; note = 2'-deoxy-2'-fluorocytidine-3'-phosphate
  modified_base 17: mod_base = OTHER; note = 2'-O-methyluridine-3'-phosphate
  modified_base 18: mod_base = OTHER; note = 2'-O-methyladenosine-3'-phosphate
  modified_base 19: mod_base = OTHER; note = 2'-O-methylguanosine-3'-phosphate
  modified_base 20: mod_base = OTHER; note = 2'-O-methylguanosine-3'-phosphate
  modified_base 21: mod_base = OTHER; note = 2'-O-methylguanosine-3'-phosphorothioate
  modified_base 22: mod_base = OTHER; note = 2'-O-methyladenosine-3'-phosphorothioate
  modified_base 23: mod_base = OTHER; note = 2'-O-methyluridine
atggagcagctgcctctagggat

SEQ ID NO: 501 - RNA, 23 nt, synthetic construct
  source 1..23: mol_type = other RNA
atccctagaggcagctgctccag

SEQ ID NO: 502 - RNA, 21 nt, synthetic construct
  source 1..21: mol_type = other RNA
  modified_base 1: mod_base = OTHER; note = 2'-O-methyluridine-3'-phosphorothioate
  modified_base 2: mod_base = OTHER; note = 2'-O-methylguanosine-3'-phosphorothioate
  modified_base 3: mod_base = OTHER; note = 2'-O-methylguanosine-3'-phosphate
  modified_base 4: mod_base = OTHER; note = 2'-O-methyladenosine-3'-phosphate
  modified_base 5: mod_base = OTHER; note = 2'-O-methylguanosine-3'-phosphate
  modified_base 6: mod_base = OTHER; note = 2'-O-methylcytidine-3'-phosphate
  modified_base 7: mod_base = OTHER; note = 2'-deoxy-2'-fluoroadenosine-3'-phosphate
  modified_base 8: mod_base = OTHER; note = 2'-O-methylcytidine-3'-phosphate
  modified_base 9: mod_base = OTHER; note = 2'-deoxy-2'-fluorocytidine-3'-phosphate
  modified_base 10: mod_base = OTHER; note = 2'-deoxy-2'-fluoroguanosine-3'-phosphate
  modified_base 11: mod_base = OTHER; note = 2'-deoxy-2'-fluorouridine-3'-phosphate
  modified_base 12: mod_base = OTHER; note = 2'-O-methyluridine-3'-phosphate
  modified_base 13: mod_base = OTHER; note = 2'-O-methyladenosine-3'-phosphate
  modified_base 14: mod_base = OTHER; note = 2'-O-methyladenosine-3'-phosphate
  modified_base 15: mod_base = OTHER; note = 2'-O-methylguanosine-3'-phosphate
  modified_base 16: mod_base = OTHER; note = 2'-O-methylguanosine-3'-phosphate
  modified_base 17: mod_base = OTHER; note = 2'-O-methyladenosine-3'-phosphate
  modified_base 18: mod_base = OTHER; note = 2'-O-methylcytidine-3'-phosphate
  modified_base 19: mod_base = OTHER; note = 2'-O-methyladenosine-3'-phosphate
  modified_base 20: mod_base = OTHER; note = 2'-O-methyladenosine-3'-phosphate
  modified_base 21: mod_base = OTHER; note = 2'-O-methyluridine-3'-phosphate ((2S,4R)-1-[29-[[2-(acetylamino)-2-deoxy-beta-D-galactopyra nosyl]oxy]-14,14-bis[[3-[[3-[[5-[[2-(acetylamino)-2-deoxy-b eta-D-galactopyranosyl]oxy]-1-oxopentyl]amino]propyl]amino] -3-oxopropoxy]methyl]-1,12,19,25-tetraoxo-16-oxa-13,20,24-t riazanonacos-1-yl]-4-hydroxy-2-pyrrolidinyl)methyl ester
tggagcaccgttaaggacaat

SEQ ID NO: 503 - RNA, 23 nt, synthetic construct
  source 1..23: mol_type = other RNA
  modified_base 1: mod_base = OTHER; note = 2'-O-methyladenosine-3'-phosphorothioate
  modified_base 2: mod_base = OTHER; note = 2'-deoxy-2'-fluorouridine-3'-phosphorothioate
  modified_base 3: mod_base = OTHER; note = 2'-O-methyluridine-3'-phosphate
  modified_base 4: mod_base = OTHER; note = 2'-O-methylguanosine-3'-phosphate
  modified_base 5: mod_base = OTHER; note = 2'-O-methyluridine-3'-phosphate
  modified_base 6: mod_base = OTHER; note = 2'-deoxy-2'-fluorocytidine-3'-phosphate
  modified_base 7: mod_base = OTHER; note = 2'-O-methylcytidine-3'-phosphate
  modified_base 8: mod_base = OTHER; note = 2'-deoxy-2'-fluorouridine-3'-phosphate
  modified_base 9: mod_base = OTHER; note = 2'-deoxy-2'-fluorouridine-3'-phosphate
  modified_base 10: mod_base = OTHER; note = 2'-O-methyladenosine-3'-phosphate
  modified_base 11: mod_base = OTHER; note = 2'-O-methyladenosine-3'-phosphate
  modified_base 12: mod_base = OTHER; note = 2'-O-methylcytidine-3'-phosphate
  modified_base 13: mod_base = OTHER; note = 2'-O-methylguanosine-3'-phosphate
  modified_base 14: mod_base = OTHER; note = 2'-deoxy-2'-fluoroguanosine-3'-phosphate
  modified_base 15: mod_base = OTHER; note = 2'-O-methyluridine-3'-phosphate
  modified_base 16: mod_base = OTHER; note = 2'-deoxy-2'-fluoroguanosine-3'-phosphate
  modified_base 17: mod_base = OTHER; note = 2'-O-methylcytidine-3'-phosphate
  modified_base 18: mod_base = OTHER; note = 2'-O-methyluridine-3'-phosphate
  modified_base 19: mod_base = OTHER; note = 2'-O-methylcytidine-3'-phosphate
  modified_base 20: mod_base = OTHER; note = 2'-O-methylcytidine-3'-phosphate
  modified_base 21: mod_base = OTHER; note = 2'-O-methyladenosine-3'-phosphorothioate
  modified_base 22: mod_base = OTHER; note = 2'-O-methylguanosine-3'-phosphorothioate
  modified_base 23: mod_base = OTHER; note = 2'-O-methyluridine
attgtccttaacggtgctccagt

SEQ ID NO: 504 - RNA, 23 nt, synthetic construct
  source 1..23: mol_type = other RNA
actggagcaccgttaaggacaag

SEQ ID NO: 505 - RNA, 21 nt, synthetic construct
  source 1..21: mol_type = other RNA
  modified_base 1: mod_base = OTHER; note = 2'-O-methylguanosine-3'-phosphorothioate
  modified_base 2: mod_base = OTHER; note = 2'-O-methyladenosine-3'-phosphorothioate
  modified_base 3: mod_base = OTHER; note = 2'-O-methylcytidine-3'-phosphate
  modified_base 4: mod_base = OTHER; note = 2'-O-methylcytidine-3'-phosphate
  modified_base 5: mod_base = OTHER; note = 2'-O-methylguanosine-3'-phosphate
  modified_base 6: mod_base = OTHER; note = 2'-O-methylcytidine-3'-phosphate
  modified_base 7: mod_base = OTHER; note = 2'-deoxy-2'-fluorocytidine-3'-phosphate
  modified_base 8: mod_base = OTHER; note = 2'-O-methyladenosine-3'-phosphate
  modified_base 9: mod_base = OTHER; note = 2'-deoxy-2'-fluoroadenosine-3'-phosphate
  modified_base 10: mod_base = OTHER; note = 2'-deoxy-2'-fluoroguanosine-3'-phosphate
  modified_base 11: mod_base = OTHER; note = 2'-deoxy-2'-fluoroguanosine-3'-phosphate
  modified_base 12: mod_base = OTHER; note = 2'-O-methyladenosine-3'-phosphate
  modified_base 13: mod_base = OTHER; note = 2'-O-methyluridine-3'-phosphate
  modified_base 14: mod_base = OTHER; note = 2'-O-methylguanosine-3'-phosphate
  modified_base 15: mod_base = OTHER; note = 2'-O-methylcytidine-3'-phosphate
  modified_base 16: mod_base = OTHER; note = 2'-O-methyladenosine-3'-phosphate
  modified_base 17: mod_base = OTHER; note = 2'-O-methylcytidine-3'-phosphate
  modified_base 18: mod_base = OTHER; note = 2'-O-methyluridine-3'-phosphate
  modified_base 19: mod_base = OTHER; note = 2'-O-methylguanosine-3'-phosphate
  modified_base 20: mod_base = OTHER; note = 2'-O-methyladenosine-3'-phosphate
  modified_base 21: mod_base = OTHER; note = 2'-O-methyluridine-3'-phosphate ((2S,4R)-1-[29-[[2-(acetylamino)-2-deoxy-beta-D-galactopyra nosyl]oxy]-14,14-bis[[3-[[3-[[5-[[2-(acetylamino)-2-deoxy-b eta-D-galactopyranosyl]oxy]-1-oxopentyl]amino]propyl]amino] -3-oxopropoxy]methyl]-1,12,19,25-tetraoxo-16-oxa-13,20,24-t riazanonacos-1-yl]-4-hydroxy-2-pyrrolidinyl)methyl ester
gaccgccaaggatgcactgat

SEQ ID NO: 506 - RNA, 23 nt, synthetic construct
  source 1..23: mol_type = other RNA
  modified_base 1: mod_base = OTHER; note = 2'-O-methyladenosine-3'-phosphorothioate
  modified_base 2: mod_base = OTHER; note = 2'-deoxy-2'-fluorouridine-3'-phosphorothioate
  modified_base 3: mod_base = OTHER; note = 2'-O-methylcytidine-3'-phosphate
  modified_base 4: mod_base = OTHER; note = 2'-O-methyladenosine-3'-phosphate
  modified_base 5: mod_base = OTHER; note = 2'-O-methylguanosine-3'-phosphate
  modified_base 6: mod_base = OTHER; note = 2'-deoxy-2'-fluorouridine-3'-phosphate
  modified_base 7: mod_base = OTHER; note = 2'-O-methylguanosine-3'-phosphate
  modified_base 8: mod_base = OTHER; note = 2'-deoxy-2'-fluorocytidine-3'-phosphate
  modified_base 9: mod_base = OTHER; note = 2'-deoxy-2'-fluoroadenosine-3'-phosphate
  modified_base 10: mod_base = OTHER; note = 2'-O-methyluridine-3'-phosphate
  modified_base 11: mod_base = OTHER; note = 2'-O-methylcytidine-3'-phosphate
  modified_base 12: mod_base = OTHER; note = 2'-O-methylcytidine-3'-phosphate
  modified_base 13: mod_base = OTHER; note = 2'-O-methyluridine-3'-phosphate
  modified_base 14: mod_base = OTHER; note = 2'-deoxy-2'-fluorouridine-3'-phosphate
  modified_base 15: mod_base = OTHER; note = 2'-O-methylguanosine-3'-phosphate
  modified_base 16: mod_base = OTHER; note = 2'-deoxy-2'-fluoroguanosine-3'-phosphate
  modified_base 17: mod_base = OTHER; note = 2'-O-methylcytidine-3'-phosphate
  modified_base 18: mod_base = OTHER; note = 2'-O-methylguanosine-3'-phosphate
  modified_base 19: mod_base = OTHER; note = 2'-O-methylguanosine-3'-phosphate
  modified_base 20: mod_base = OTHER; note = 2'-O-methyluridine-3'-phosphate
  modified_base 21: mod_base = OTHER; note = 2'-O-methylcytidine-3'-phosphorothioate
  modified_base 22: mod_base = OTHER; note = 2'-O-methyluridine-3'-phosphorothioate
  modified_base 23: mod_base = OTHER; note = 2'-O-methyluridine
atcagtgcatccttggcggtctt

SEQ ID NO: 507 - RNA, 23 nt, synthetic construct
  source 1..23: mol_type = other RNA
aagaccgccaaggatgcactgag

SEQ ID NO: 508 - RNA, 21 nt, synthetic construct
  source 1..21: mol_type = other RNA
  modified_base 1: mod_base = OTHER; note = 2'-O-methyluridine-3'-phosphorothioate
  modified_base 2: mod_base = OTHER; note = 2'-O-methyladenosine-3'-phosphorothioate
  modified_base 3: mod_base = OTHER; note = 2'-O-methyladenosine-3'-phosphate
  modified_base 4: mod_base = OTHER; note = 2'-O-methyladenosine-3'-phosphate
  modified_base 5: mod_base = OTHER; note = 2'-O-methylguanosine-3'-phosphate
  modified_base 6: mod_base = OTHER; note = 2'-O-methylcytidine-3'-phosphate
  modified_base 7: mod_base = OTHER; note = 2'-deoxy-2'-fluorouridine-3'-phosphate
  modified_base 8: mod_base = OTHER; note = 2'-O-methylguanosine-3'-phosphate
  modified_base 9: mod_base = OTHER; note = 2'-deoxy-2'-fluoroguanosine-3'-phosphate
  modified_base 10: mod_base = OTHER; note = 2'-deoxy-2'-fluoroadenosine-3'-phosphate
  modified_base 11: mod_base = OTHER; note = 2'-deoxy-2'-fluorocytidine-3'-phosphate
  modified_base 12: mod_base = OTHER; note = 2'-O-methyladenosine-3'-phosphate
  modified_base 13: mod_base = OTHER; note = 2'-O-methyladenosine-3'-phosphate
  modified_base 14: mod_base = OTHER; note = 2'-O-methylguanosine-3'-phosphate
  modified_base 15: mod_base = OTHER; note = 2'-O-methyladenosine-3'-phosphate
  modified_base 16: mod_base = OTHER; note = 2'-O-methyladenosine-3'-phosphate
  modified_base 17: mod_base = OTHER; note = 2'-O-methylguanosine-3'-phosphate
  modified_base 18: mod_base = OTHER; note = 2'-O-methylcytidine-3'-phosphate
  modified_base 19: mod_base = OTHER; note = 2'-O-methyluridine-3'-phosphate
  modified_base 20: mod_base = OTHER; note = 2'-O-methylguanosine-3'-phosphate
  modified_base 21: mod_base = OTHER; note = 2'-O-methyluridine-3'-phosphate ((2S,4R)-1-[29-[[2-(acetylamino)-2-deoxy-beta-D-galactopyra nosyl]oxy]-14,14-bis[[3-[[3-[[5-[[2-(acetylamino)-2-deoxy-b eta-D-galactopyranosyl]oxy]-1-oxopentyl]amino]propyl]amino] -3-oxopropoxy]methyl]-1,12,19,25-tetraoxo-16-oxa-13,20,24-t riazanonacos-1-yl]-4-hydroxy-2-pyrrolidinyl)methyl ester
taaagctggacaagaagctgt

SEQ ID NO: 509 - RNA, 23 nt, synthetic construct
  source 1..23: mol_type = other RNA
  modified_base 1: mod_base = OTHER; note = 2'-O-methyladenosine-3'-phosphorothioate
  modified_base 2: mod_base = OTHER; note = 2'-deoxy-2'-fluorocytidine-3'-phosphorothioate
  modified_base 3: mod_base = OTHER; note = 2'-O-methyladenosine-3'-phosphate
  modified_base 4: mod_base = OTHER; note = 2'-O-methylguanosine-3'-phosphate
  modified_base 5: mod_base = OTHER; note = 2'-O-methylcytidine-3'-phosphate
  modified_base 6: mod_base = OTHER; note = 2'-deoxy-2'-fluorouridine-3'-phosphate
  modified_base 7: mod_base = OTHER; note = 2'-O-methyluridine-3'-phosphate
  modified_base 8: mod_base = OTHER; note = 2'-deoxy-2'-fluorocytidine-3'-phosphate
  modified_base 9: mod_base = OTHER; note = 2'-deoxy-2'-fluorouridine-3'-phosphate
  modified_base 10: mod_base = OTHER; note = 2'-O-methyluridine-3'-phosphate
  modified_base 11: mod_base = OTHER; note = 2'-O-methylguanosine-3'-phosphate
  modified_base 12: mod_base = OTHER; note = 2'-O-methyluridine-3'-phosphate
  modified_base 13: mod_base = OTHER; note = 2'-O-methylcytidine-3'-phosphate
  modified_base 14: mod_base = OTHER; note = 2'-deoxy-2'-fluorocytidine-3'-phosphate
  modified_base 15: mod_base = OTHER; note = 2'-O-methyladenosine-3'-phosphate
  modified_base 16: mod_base = OTHER; note = 2'-deoxy-2'-fluoroguanosine-3'-phosphate
  modified_base 17: mod_base = OTHER; note = 2'-O-methylcytidine-3'-phosphate
  modified_base 18: mod_base = OTHER; note = 2'-O-methyluridine-3'-phosphate
  modified_base 19: mod_base = OTHER; note = 2'-O-methyluridine-3'-phosphate
  modified_base 20: mod_base = OTHER; note = 2'-O-methyluridine-3'-phosphate
  modified_base 21: mod_base = OTHER; note = 2'-O-methyladenosine-3'-phosphorothioate
  modified_base 22: mod_base = OTHER; note = 2'-O-methyluridine-3'-phosphorothioate
  modified_base 23: mod_base = OTHER; note = 2'-O-methyluridine
acagcttcttgtccagctttatt

SEQ ID NO: 510 - RNA, 23 nt, synthetic construct
  source 1..23: mol_type = other RNA
aataaagctggacaagaagctgc

SEQ ID NO: 511 - RNA, 21 nt, synthetic construct
  source 1..21: mol_type = other RNA
  modified_base 1: mod_base = OTHER; note = 2'-O-methyluridine-3'-phosphorothioate
  modified_base 2: mod_base = OTHER; note = 2'-O-methylcytidine-3'-phosphorothioate
  modified_base 3: mod_base = OTHER; note = 2'-O-methylcytidine-3'-phosphate
  modified_base 4: mod_base = OTHER; note = 2'-O-methylcytidine-3'-phosphate
  modified_base 5: mod_base = OTHER; note = 2'-O-methyluridine-3'-phosphate
  modified_base 6: mod_base = OTHER; note = 2'-O-methylguanosine-3'-phosphate
  modified_base 7: mod_base = OTHER; note = 2'-deoxy-2'-fluoroadenosine-3'-phosphate
  modified_base 8: mod_base = OTHER; note = 2'-O-methyladenosine-3'-phosphate
  modified_base 9: mod_base = OTHER; note = 2'-deoxy-2'-fluoroadenosine-3'-phosphate
  modified_base 10: mod_base = OTHER; note = 2'-deoxy-2'-fluoroguanosine-3'-phosphate
  modified_base 11: mod_base = OTHER; note = 2'-deoxy-2'-fluoroadenosine-3'-phosphate
  modified_base 12: mod_base = OTHER; note = 2'-O-methylcytidine-3'-phosphate
  modified_base 13: mod_base = OTHER; note = 2'-O-methyluridine-3'-phosphate
  modified_base 14: mod_base = OTHER; note = 2'-O-methyladenosine-3'-phosphate
  modified_base 15: mod_base = OTHER; note = 2'-O-methylcytidine-3'-phosphate
  modified_base 16: mod_base = OTHER; note = 2'-O-methyluridine-3'-phosphate
  modified_base 17: mod_base = OTHER; note = 2'-O-methylguanosine-3'-phosphate
  modified_base 18: mod_base = OTHER; note = 2'-O-methylguanosine-3'-phosphate
  modified_base 19: mod_base = OTHER; note = 2'-O-methyladenosine-3'-phosphate
  modified_base 20: mod_base = OTHER; note = 2'-O-methylguanosine-3'-phosphate
  modified_base 21: mod_base = OTHER; note = 2'-O-methyluridine-3'-phosphate ((2S,4R)-1-[29-[[2-(acetylamino)-2-deoxy-beta-D-galactopyra nosyl]oxy]-14,14-bis[[3-[[3-[[5-[[2-(acetylamino)-2-deoxy-b eta-D-galactopyranosyl]oxy]-1-oxopentyl]amino]propyl]amino] -3-oxopropoxy]methyl]-1,12,19,25-tetraoxo-16-oxa-13,20,24-t riazanonacos-1-yl]-4-hydroxy-2-pyrrolidinyl)methyl ester
tccctgaaagactactggagt

SEQ ID NO: 512 - RNA, 23 nt, synthetic construct
  source 1..23: mol_type = other RNA
  modified_base 1: mod_base = OTHER; note = 2'-O-methyladenosine-3'-phosphorothioate
  modified_base 2: mod_base = OTHER; note = 2'-deoxy-2'-fluorocytidine-3'-phosphorothioate
  modified_base 3: mod_base = OTHER; note = 2'-O-methyluridine-3'-phosphate
  modified_base 4: mod_base = OTHER; note = 2'-O-methylcytidine-3'-phosphate
  modified_base 5: mod_base = OTHER; note = 2'-O-methylcytidine-3'-phosphate
  modified_base 6: mod_base = OTHER; note = 2'-deoxy-2'-fluoroadenosine-3'-phosphate
  modified_base 7: mod_base = OTHER; note = 2'-O-methylguanosine-3'-phosphate
  modified_base 8: mod_base = OTHER; note = 2'-deoxy-2'-fluorouridine-3'-phosphate
  modified_base 9: mod_base = OTHER; note = 2'-deoxy-2'-fluoroadenosine-3'-phosphate
  modified_base 10: mod_base = OTHER; note = 2'-O-methylguanosine-3'-phosphate
  modified_base 11: mod_base = OTHER; note = 2'-O-methyluridine-3'-phosphate
  modified_base 12: mod_base = OTHER; note = 2'-O-methylcytidine-3'-phosphate
  modified_base 13: mod_base = OTHER; note = 2'-O-methyluridine-3'-phosphate
  modified_base 14: mod_base = OTHER; note = 2'-deoxy-2'-fluorouridine-3'-phosphate
  modified_base 15: mod_base = OTHER; note = 2'-O-methyluridine-3'-phosphate
  modified_base 16: mod_base = OTHER; note = 2'-deoxy-2'-fluorocytidine-3'-phosphate
  modified_base 17: mod_base = OTHER; note = 2'-O-methyladenosine-3'-phosphate
  modified_base 18: mod_base = OTHER; note = 2'-O-methylguanosine-3'-phosphate
  modified_base 19: mod_base = OTHER; note = 2'-O-methylguanosine-3'-phosphate
  modified_base 20: mod_base = OTHER; note = 2'-O-methylguanosine-3'-phosphate
  modified_base 21: mod_base = OTHER; note = 2'-O-methyladenosine-3'-phosphorothioate
  modified_base 22: mod_base = OTHER; note = 2'-O-methyladenosine-3'-phosphorothioate
  modified_base 23: mod_base = OTHER; note = 2'-O-methylcytidine
actccagtagtctttcagggaac

SEQ ID NO: 513 - RNA, 23 nt, synthetic construct
  source 1..23: mol_type = other RNA
gttccctgaaagactactggagc

SEQ ID NO: 514 - RNA, 21 nt, synthetic construct
  source 1..21: mol_type = other RNA
  modified_base 1: mod_base = OTHER; note = 2'-O-methylguanosine-3'-phosphorothioate
  modified_base 2: mod_base = OTHER; note = 2'-O-methyladenosine-3'-phosphorothioate
  modified_base 3: mod_base = OTHER; note = 2'-O-methylcytidine-3'-phosphate
  modified_base 4: mod_base = OTHER; note = 2'-O-methylcytidine-3'-phosphate
  modified_base 5: mod_base = OTHER; note = 2'-O-methylguanosine-3'-phosphate
  modified_base 6: mod_base = OTHER; note = 2'-O-methyladenosine-3'-phosphate
  modified_base 7: mod_base = OTHER; note = 2'-deoxy-2'-fluorouridine-3'-phosphate
  modified_base 8: mod_base = OTHER; note = 2'-O-methylguanosine-3'-phosphate
  modified_base 9: mod_base = OTHER; note = 2'-deoxy-2'-fluoroguanosine-3'-phosphate
  modified_base 10: mod_base = OTHER; note = 2'-deoxy-2'-fluorocytidine-3'-phosphate
  modified_base 11: mod_base = OTHER; note = 2'-deoxy-2'-fluorouridine-3'-phosphate
  modified_base 12: mod_base = OTHER; note = 2'-O-methyluridine-3'-phosphate
  modified_base 13: mod_base = OTHER; note = 2'-O-methylcytidine-3'-phosphate
  modified_base 14: mod_base = OTHER; note = 2'-O-methyladenosine-3'-phosphate
  modified_base 15: mod_base = OTHER; note = 2'-O-methylguanosine-3'-phosphate
  modified_base 16: mod_base = OTHER; note = 2'-O-methyluridine-3'-phosphate
  modified_base 17: mod_base = OTHER; note = 2'-O-methyluridine-3'-phosphate
  modified_base 18: mod_base = OTHER; note = 2'-O-methylcytidine-3'-phosphate
  modified_base 19: mod_base = OTHER; note = 2'-O-methylcytidine-3'-phosphate
  modified_base 20: mod_base = OTHER; note = 2'-O-methylcytidine-3'-phosphate
  modified_base 21: mod_base = OTHER; note = 2'-O-methyluridine-3'-phosphate ((2S,4R)-1-[29-[[2-(acetylamino)-2-deoxy-beta-D-galactopyra nosyl]oxy]-14,14-bis[[3-[[3-[[5-[[2-(acetylamino)-2-deoxy-b eta-D-galactopyranosyl]oxy]-1-oxopentyl]amino]propyl]amino] -3-oxopropoxy]methyl]-1,12,19,25-tetraoxo-16-oxa-13,20,24-t riazanonacos-1-yl]-4-hydroxy-2-pyrrolidinyl)methyl ester
gaccgatggcttcagttccct

SEQ ID NO: 515 - RNA, 23 nt, synthetic construct
  source 1..23: mol_type = other RNA
  modified_base 1: mod_base = OTHER; note = 2'-O-methyladenosine-3'-phosphorothioate
  modified_base 2: mod_base = OTHER; note = 2'-deoxy-2'-fluoroguanosine-3'-phosphorothioate
  modified_base 3: mod_base = OTHER; note = 2'-O-methylguanosine-3'-phosphate
  modified_base 4: mod_base = OTHER; note = 2'-O-methylguanosine-3'-phosphate
  modified_base 5: mod_base = OTHER; note = 2'-O-methyladenosine-3'-phosphate
  modified_base 6: mod_base = OTHER; note = 2'-deoxy-2'-fluoroadenosine-3'-phosphate
  modified_base 7: mod_base = OTHER; note = 2'-O-methylcytidine-3'-phosphate
  modified_base 8: mod_base = OTHER; note = 2'-deoxy-2'-fluorouridine-3'-phosphate
  modified_base 9: mod_base = OTHER; note = 2'-deoxy-2'-fluoroguanosine-3'-phosphate
  modified_base 10: mod_base = OTHER; note = 2'-O-methyladenosine-3'-phosphate
  modified_base 11: mod_base = OTHER; note = 2'-O-methyladenosine-3'-phosphate
  modified_base 12: mod_base = OTHER; note = 2'-O-methylguanosine-3'-phosphate
  modified_base 13: mod_base = OTHER; note = 2'-O-methylcytidine-3'-phosphate
  modified_base 14: mod_base = OTHER; note = 2'-deoxy-2'-fluorocytidine-3'-phosphate
  modified_base 15: mod_base = OTHER; note = 2'-O-methyladenosine-3'-phosphate
  modified_base 16: mod_base = OTHER; note = 2'-deoxy-2'-fluorouridine-3'-phosphate
  modified_base 17: mod_base = OTHER; note = 2'-O-methylcytidine-3'-phosphate
  modified_base 18: mod_base = OTHER; note = 2'-O-methylguanosine-3'-phosphate
  modified_base 19: mod_base = OTHER; note = 2'-O-methylguanosine-3'-phosphate
  modified_base 20: mod_base = OTHER; note = 2'-O-methyluridine-3'-phosphate
  modified_base 21: mod_base = OTHER; note = 2'-O-methylcytidine-3'-phosphorothioate
  modified_base 22: mod_base = OTHER; note = 2'-O-methyladenosine-3'-phosphorothioate
  modified_base 23: mod_base = OTHER; note = 2'-O-methylcytidine
agggaactgaagccatcggtcac

SEQ ID NO: 516 - RNA, 23 nt, synthetic construct
  source 1..23: mol_type = other RNA
gtgaccgatggcttcagttccct

SEQ ID NO: 517 - RNA, 21 nt, synthetic construct
  source 1..21: mol_type = other RNA
  modified_base 1: mod_base = OTHER; note = 2'-O-methyluridine-3'-phosphorothioate
  modified_base 2: mod_base = OTHER; note = 2'-O-methylcytidine-3'-phosphorothioate
  modified_base 3: mod_base = OTHER; note = 2'-O-methylcytidine-3'-phosphate
  modified_base 4: mod_base = OTHER; note = 2'-O-methylcytidine-3'-phosphate
  modified_base 5: mod_base = OTHER; note = 2'-O-methyluridine-3'-phosphate
  modified_base 6: mod_base = OTHER; note = 2'-O-methyladenosine-3'-phosphate
  modified_base 7: mod_base = OTHER; note = 2'-deoxy-2'-fluoroguanosine-3'-phosphate
  modified_base 8: mod_base = OTHER; note = 2'-O-methyladenosine-3'-phosphate
  modified_base 9: mod_base = OTHER; note = 2'-deoxy-2'-fluoroguanosine-3'-phosphate
  modified_base 10: mod_base = OTHER; note = 2'-deoxy-2'-fluoroguanosine-3'-phosphate
  modified_base 11: mod_base = OTHER; note = 2'-deoxy-2'-fluorocytidine-3'-phosphate
  modified_base 12: mod_base = OTHER; note = 2'-O-methyladenosine-3'-phosphate
  modified_base 13: mod_base = OTHER; note = 2'-O-methylguanosine-3'-phosphate
  modified_base 14: mod_base = OTHER; note = 2'-O-methylcytidine-3'-phosphate
  modified_base 15: mod_base = OTHER; note = 2'-O-methyluridine-3'-phosphate
  modified_base 16: mod_base = OTHER; note = 2'-O-methylguanosine-3'-phosphate
  modified_base 17: mod_base = OTHER; note = 2'-O-methylcytidine-3'-phosphate
  modified_base 18: mod_base = OTHER; note = 2'-O-methyluridine-3'-phosphate
  modified_base 19: mod_base = OTHER; note = 2'-O-methylcytidine-3'-phosphate
  modified_base 20: mod_base = OTHER; note = 2'-O-methylcytidine-3'-phosphate
  modified_base 21: mod_base = OTHER; note = 2'-O-methyluridine-3'-phosphate ((2S,4R)-1-[29-[[2-(acetylamino)-2-deoxy-beta-D-galactopyra nosyl]oxy]-14,14-bis[[3-[[3-[[5-[[2-(acetylamino)-2-deoxy-b eta-D-galactopyranosyl]oxy]-1-oxopentyl]amino]propyl]amino] -3-oxopropoxy]methyl]-1,12,19,25-tetraoxo-16-oxa-13,20,24-t riazanonacos-1-yl]-4-hydroxy-2-pyrrolidinyl)methyl ester
tccctagaggcagctgctcct

SEQ ID NO: 518 - RNA, 23 nt, synthetic construct
  source 1..23: mol_type = other RNA
  modified_base 1: mod_base = OTHER; note = 2'-O-methyladenosine-3'-phosphorothioate
  modified_base 2: mod_base = OTHER; note = 2'-deoxy-2'-fluoroguanosine-3'-phosphorothioate
  modified_base 3: mod_base = OTHER; note = 2'-O-methylguanosine-3'-phosphate
  modified_base 4: mod_base = OTHER; note = 2'-O-methyladenosine-3'-phosphate
  modified_base 5: mod_base = OTHER; note = 2'-O-methylguanosine-3'-phosphate
  modified_base 6: mod_base = OTHER; note = 2'-deoxy-2'-fluorocytidine-3'-phosphate
  modified_base 7: mod_base = OTHER; note = 2'-O-methyladenosine-3'-phosphate
  modified_base 8: mod_base = OTHER; note = 2'-deoxy-2'-fluoroguanosine-3'-phosphate
  modified_base 9: mod_base = OTHER; note = 2'-deoxy-2'-fluorocytidine-3'-phosphate
  modified_base 10: mod_base = OTHER; note = 2'-O-methyluridine-3'-phosphate
  modified_base 11: mod_base = OTHER; note = 2'-O-methylguanosine-3'-phosphate
  modified_base 12: mod_base = OTHER; note = 2'-O-methylcytidine-3'-phosphate
  modified_base 13: mod_base = OTHER; note = 2'-O-methylcytidine-3'-phosphate
  modified_base 14: mod_base = OTHER; note = 2'-deoxy-2'-fluorouridine-3'-phosphate
  modified_base 15: mod_base = OTHER; note = 2'-O-methylcytidine-3'-phosphate
  modified_base 16: mod_base = OTHER; note = 2'-deoxy-2'-fluorouridine-3'-phosphate
  modified_base 17: mod_base = OTHER; note = 2'-O-methyladenosine-3'-phosphate
  modified_base 18: mod_base = OTHER; note = 2'-O-methylguanosine-3'-phosphate
  modified_base 19: mod_base = OTHER; note = 2'-O-methylguanosine-3'-phosphate
  modified_base 20: mod_base = OTHER; note = 2'-O-methylguanosine-3'-phosphate
  modified_base 21: mod_base = OTHER; note = 2'-O-methyladenosine-3'-phosphorothioate
  modified_base 22: mod_base = OTHER; note = 2'-O-methyluridine-3'-phosphorothioate
  modified_base 23: mod_base = OTHER; note = 2'-O-methylguanosine
aggagcagctgcctctagggatg

SEQ ID NO: 519 - RNA, 23 nt, synthetic construct
  source 1..23: mol_type = other RNA
catccctagaggcagctgctcca

SEQ ID NO: 520 - RNA, 21 nt, synthetic construct
  source 1..21: mol_type = other RNA
  modified_base 1: mod_base = OTHER; note = 2'-O-methylcytidine-3'-phosphorothioate
  modified_base 2: mod_base = OTHER; note = 2'-O-methylcytidine-3'-phosphorothioate
  modified_base 3: mod_base = OTHER; note = 2'-O-methylguanosine-3'-phosphate
  modified_base 4: mod_base = OTHER; note = 2'-O-methyladenosine-3'-phosphate
  modified_base 5: mod_base = OTHER; note = 2'-O-methyluridine-3'-phosphate
  modified_base 6: mod_base = OTHER; note = 2'-O-methylguanosine-3'-phosphate
  modified_base 7: mod_base = OTHER; note = 2'-deoxy-2'-fluoroguanosine-3'-phosphate
  modified_base 8: mod_base = OTHER; note = 2'-O-methylcytidine-3'-phosphate
  modified_base 9: mod_base = OTHER; note = 2'-deoxy-2'-fluorouridine-3'-phosphate
  modified_base 10: mod_base = OTHER; note = 2'-deoxy-2'-fluorouridine-3'-phosphate
  modified_base 11: mod_base = OTHER; note = 2'-deoxy-2'-fluorocytidine-3'-phosphate
  modified_base 12: mod_base = OTHER; note = 2'-O-methyladenosine-3'-phosphate
  modified_base 13: mod_base = OTHER; note = 2'-O-methylguanosine-3'-phosphate
  modified_base 14: mod_base = OTHER; note = 2'-O-methyluridine-3'-phosphate
  modified_base 15: mod_base = OTHER; note = 2'-O-methyluridine-3'-phosphate
  modified_base 16: mod_base = OTHER; note = 2'-O-methylcytidine-3'-phosphate
  modified_base 17: mod_base = OTHER; note = 2'-O-methylcytidine-3'-phosphate
  modified_base 18: mod_base = OTHER; note = 2'-O-methylcytidine-3'-phosphate
  modified_base 19: mod_base = OTHER; note = 2'-O-methyluridine-3'-phosphate
  modified_base 20: mod_base = OTHER; note = 2'-O-methylguanosine-3'-phosphate
  modified_base 21: mod_base = OTHER; note = 2'-O-methyluridine-3'-phosphate ((2S,4R)-1-[29-[[2-(acetylamino)-2-deoxy-beta-D-galactopyra nosyl]oxy]-14,14-bis[[3-[[3-[[5-[[2-(acetylamino)-2-deoxy-b eta-D-galactopyranosyl]oxy]-1-oxopentyl]amino]propyl]amino] -3-oxopropoxy]methyl]-1,12,19,25-tetraoxo-16-oxa-13,20,24-t riazanonacos-1-yl]-4-hydroxy-2-pyrrolidinyl)methyl ester
ccgatggcttcagttccctgt

SEQ ID NO: 521 - RNA, 23 nt, synthetic construct
  source 1..23: mol_type = other RNA
  modified_base 1: mod_base = OTHER; note = 2'-O-methyladenosine-3'-phosphorothioate
  modified_base 2: mod_base = OTHER; note = 2'-deoxy-2'-fluorocytidine-3'-phosphorothioate
  modified_base 3: mod_base = OTHER; note = 2'-O-methyladenosine-3'-phosphate
  modified_base 4: mod_base = OTHER; note = 2'-O-methylguanosine-3'-phosphate
  modified_base 5: mod_base = OTHER; note = 2'-O-methylguanosine-3'-phosphate
  modified_base 6: mod_base = OTHER; note = 2'-deoxy-2'-fluoroguanosine-3'-phosphate
  modified_base 7: mod_base = OTHER; note = 2'-O-methyladenosine-3'-phosphate
  modified_base 8: mod_base = OTHER; note = 2'-deoxy-2'-fluoroadenosine-3'-phosphate
  modified_base 9: mod_base = OTHER; note = 2'-deoxy-2'-fluorocytidine-3'-phosphate
  modified_base 10: mod_base = OTHER; note = 2'-O-methyluridine-3'-phosphate
  modified_base 11: mod_base = OTHER; note = 2'-O-methylguanosine-3'-phosphate
  modified_base 12: mod_base = OTHER; note = 2'-O-methyladenosine-3'-phosphate
  modified_base 13: mod_base = OTHER; note = 2'-O-methyladenosine-3'-phosphate
  modified_base 14: mod_base = OTHER; note = 2'-deoxy-2'-fluoroguanosine-3'-phosphate
  modified_base 15: mod_base = OTHER; note = 2'-O-methylcytidine-3'-phosphate
  modified_base 16: mod_base = OTHER; note = 2'-deoxy-2'-fluorocytidine-3'-phosphate
  modified_base 17: mod_base = OTHER; note = 2'-O-methyladenosine-3'-phosphate
  modified_base 18: mod_base = OTHER; note = 2'-O-methyluridine-3'-phosphate
  modified_base 19: mod_base = OTHER; note = 2'-O-methylcytidine-3'-phosphate
  modified_base 20: mod_base = OTHER; note = 2'-O-methylguanosine-3'-phosphate
  modified_base 21: mod_base = OTHER; note = 2'-O-methylguanosine-3'-phosphorothioate
  modified_base 22: mod_base = OTHER; note = 2'-O-methyluridine-3'-phosphorothioate
  modified_base 23: mod_base = OTHER; note = 2'-O-methylcytidine
acagggaactgaagccatcggtc

SEQ ID NO: 522 - RNA, 23 nt, synthetic construct
  source 1..23: mol_type = other RNA
gaccgatggcttcagttccctga

SEQ ID NO: 523 - RNA, 21 nt, synthetic construct
  source 1..21: mol_type = other RNA
  modified_base 1: mod_base = OTHER; note = 2'-O-methylguanosine-3'-phosphorothioate
  modified_base 2: mod_base = OTHER; note = 2'-O-methyluridine-3'-phosphorothioate
  modified_base 3: mod_base = OTHER; note = 2'-O-methyladenosine-3'-phosphate
  modified_base 4: mod_base = OTHER; note = 2'-O-methylguanosine-3'-phosphate
  modified_base 5: mod_base = OTHER; note = 2'-O-methylguanosine-3'-phosphate
  modified_base 6: mod_base = OTHER; note = 2'-O-methyluridine-3'-phosphate
  modified_base 7: mod_base = OTHER; note = 2'-deoxy-2'-fluorouridine-3'-phosphate
  modified_base 8: mod_base = OTHER; note = 2'-O-methylguanosine-3'-phosphate
  modified_base 9: mod_base = OTHER; note = 2'-deoxy-2'-fluorocytidine-3'-phosphate
  modified_base 10: mod_base = OTHER; note = 2'-deoxy-2'-fluorouridine-3'-phosphate
  modified_base 11: mod_base = OTHER; note = 2'-deoxy-2'-fluorouridine-3'-phosphate
  modified_base 12: mod_base = OTHER; note = 2'-O-methyladenosine-3'-phosphate
  modified_base 13: mod_base = OTHER; note = 2'-O-methyladenosine-3'-phosphate
  modified_base 14: mod_base = OTHER; note = 2'-O-methyladenosine-3'-phosphate
  modified_base 15: mod_base = OTHER; note = 2'-O-methyladenosine-3'-phosphate
  modified_base 16: mod_base = OTHER; note = 2'-O-methylguanosine-3'-phosphate
  modified_base 17: mod_base = OTHER; note = 2'-O-methylguanosine-3'-phosphate
  modified_base 18: mod_base = OTHER; note = 2'-O-methylguanosine-3'-phosphate
  modified_base 19: mod_base = OTHER; note = 2'-O-methyladenosine-3'-phosphate
  modified_base 20: mod_base = OTHER; note = 2'-O-methylcytidine-3'-phosphate
  modified_base 21: mod_base = OTHER; note = 2'-O-methyluridine-3'-phosphate ((2S,4R)-1-[29-[[2-(acetylamino)-2-deoxy-beta-D-galactopyra nosyl]oxy]-14,14-bis[[3-[[3-[[5-[[2-(acetylamino)-2-deoxy-b eta-D-galactopyranosyl]oxy]-1-oxopentyl]amino]propyl]amino] -3-oxopropoxy]methyl]-1,12,19,25-tetraoxo-16-oxa-13,20,24-t riazanonacos-1-yl]-4-hydroxy-2-pyrrolidinyl)methyl ester
gtaggttgcttaaaagggact

SEQ ID NO: 524 - RNA, 23 nt, synthetic construct
  source 1..23: mol_type = other RNA
  modified_base 1: mod_base = OTHER; note = 2'-O-methyladenosine-3'-phosphorothioate
  modified_base 2: mod_base = OTHER; note = 2'-deoxy-2'-fluoroguanosine-3'-phosphorothioate
  modified_base 3: mod_base = OTHER; note = 2'-O-methyluridine-3'-phosphate
  modified_base 4: mod_base = OTHER; note = 2'-O-methylcytidine-3'-phosphate
  modified_base 5: mod_base = OTHER; note = 2'-O-methylcytidine-3'-phosphate
  modified_base 6: mod_base = OTHER; note = 2'-deoxy-2'-fluorocytidine-3'-phosphate
  modified_base 7: mod_base = OTHER; note = 2'-O-methyluridine-3'-phosphate
  modified_base 8: mod_base = OTHER; note = 2'-deoxy-2'-fluorouridine-3'-phosphate
  modified_base 9: mod_base = OTHER; note = 2'-deoxy-2'-fluorouridine-3'-phosphate
  modified_base 10: mod_base = OTHER; note = 2'-O-methyluridine-3'-phosphate
  modified_base 11: mod_base = OTHER; note = 2'-O-methyladenosine-3'-phosphate
  modified_base 12: mod_base = OTHER; note = 2'-O-methyladenosine-3'-phosphate
  modified_base 13: mod_base = OTHER; note = 2'-O-methylguanosine-3'-phosphate
  modified_base 14: mod_base = OTHER; note = 2'-deoxy-2'-fluorocytidine-3'-phosphate
  modified_base 15: mod_base = OTHER; note = 2'-O-methyladenosine-3'-phosphate
  modified_base 16: mod_base = OTHER; note = 2'-deoxy-2'-fluoroadenosine-3'-phosphate
  modified_base 17: mod_base = OTHER; note = 2'-O-methylcytidine-3'-phosphate
  modified_base 18: mod_base = OTHER; note = 2'-O-methylcytidine-3'-phosphate
  modified_base 19: mod_base = OTHER; note = 2'-O-methyluridine-3'-phosphate
  modified_base 20: mod_base = OTHER; note = 2'-O-methyladenosine-3'-phosphate
  modified_base 21: mod_base = OTHER; note = 2'-O-methylcytidine-3'-phosphorothioate
  modified_base 22: mod_base = OTHER; note = 2'-O-methyladenosine-3'-phosphorothioate
  modified_base 23: mod_base = OTHER; note = 2'-O-methylguanosine
agtcccttttaagcaacctacag

SEQ ID NO: 525 - RNA, 23 nt, synthetic construct
  source 1..23: mol_type = other RNA
ctgtaggttgcttaaaagggaca

SEQ ID NO: 526 - RNA, 21 nt, synthetic construct
  source 1..21: mol_type = other RNA
  modified_base 1: mod_base = OTHER; note = 2'-O-methylcytidine-3'-phosphorothioate
  modified_base 2: mod_base = OTHER; note = 2'-O-methylcytidine-3'-phosphorothioate
  modified_base 3: mod_base = OTHER; note = 2'-O-methyluridine-3'-phosphate
  modified_base 4: mod_base = OTHER; note = 2'-O-methyladenosine-3'-phosphate
  modified_base 5: mod_base = OTHER; note = 2'-O-methylguanosine-3'-phosphate
  modified_base 6: mod_base = OTHER; note = 2'-O-methyladenosine-3'-phosphate
  modified_base 7: mod_base = OTHER; note = 2'-deoxy-2'-fluoroguanosine-3'-phosphate
  modified_base 8: mod_base = OTHER; note = 2'-O-methylguanosine-3'-phosphate
  modified_base 9: mod_base = OTHER; note = 2'-deoxy-2'-fluorocytidine-3'-phosphate
  modified_base 10: mod_base = OTHER; note = 2'-deoxy-2'-fluoroadenosine-3'-phosphate
  modified_base 11: mod_base = OTHER; note = 2'-deoxy-2'-fluoroguanosine-3'-phosphate
  modified_base 12: mod_base = OTHER; note = 2'-O-methylcytidine-3'-phosphate
  modified_base 13: mod_base = OTHER; note = 2'-O-methyluridine-3'-phosphate
  modified_base 14: mod_base = OTHER; note = 2'-O-methylguanosine-3'-phosphate
  modified_base 15: mod_base = OTHER; note = 2'-O-methylcytidine-3'-phosphate
  modified_base 16: mod_base = OTHER; note = 2'-O-methyluridine-3'-phosphate
  modified_base 17: mod_base = OTHER; note = 2'-O-methylcytidine-3'-phosphate
  modified_base 18: mod_base = OTHER; note = 2'-O-methylcytidine-3'-phosphate
  modified_base 19: mod_base = OTHER; note = 2'-O-methyladenosine-3'-phosphate
  modified_base 20: mod_base = OTHER; note = 2'-O-methylguanosine-3'-phosphate
  modified_base 21: mod_base = OTHER; note = 2'-O-methyluridine-3'-phosphate ((2S,4R)-1-[29-[[2-(acetylamino)-2-deoxy-beta-D-galactopyra nosyl]oxy]-14,14-bis[[3-[[3-[[5-[[2-(acetylamino)-2-deoxy-b eta-D-galactopyranosyl]oxy]-1-oxopentyl]amino]propyl]amino] -3-oxopropoxy]methyl]-1,12,19,25-tetraoxo-16-oxa-13,20,24-t riazanonacos-1-yl]-4-hydroxy-2-pyrrolidinyl)methyl ester
cctagaggcagctgctccagt

SEQ ID NO: 527 - RNA, 23 nt, synthetic construct
  source 1..23: mol_type = other RNA
  modified_base 1: mod_base = OTHER; note = 2'-O-methyladenosine-3'-phosphorothioate
  modified_base 2: mod_base = OTHER; note = 2'-deoxy-2'-fluorocytidine-3'-phosphorothioate
  modified_base 3: mod_base = OTHER; note = 2'-O-methyluridine-3'-phosphate
  modified_base 4: mod_base = OTHER; note = 2'-O-methylguanosine-3'-phosphate
  modified_base 5: mod_base = OTHER; note = 2'-O-methylguanosine-3'-phosphate
  modified_base 6: mod_base = OTHER; note = 2'-deoxy-2'-fluoroadenosine-3'-phosphate
  modified_base 7: mod_base = OTHER; note = 2'-O-methylguanosine-3'-phosphate
  modified_base 8: mod_base = OTHER; note = 2'-deoxy-2'-fluorocytidine-3'-phosphate
  modified_base 9: mod_base = OTHER; note = 2'-deoxy-2'-fluoroadenosine-3'-phosphate
  modified_base 10: mod_base = OTHER; note = 2'-O-methylguanosine-3'-phosphate
  modified_base 11: mod_base = OTHER; note = 2'-O-methylcytidine-3'-phosphate
  modified_base 12: mod_base = OTHER; note = 2'-O-methyluridine-3'-phosphate
  modified_base 13: mod_base = OTHER; note = 2'-O-methylguanosine-3'-phosphate
  modified_base 14: mod_base = OTHER; note = 2'-deoxy-2'-fluorocytidine-3'-phosphate
  modified_base 15: mod_base = OTHER; note = 2'-O-methylcytidine-3'-phosphate
  modified_base 16: mod_base = OTHER; note = 2'-deoxy-2'-fluorouridine-3'-phosphate
  modified_base 17: mod_base = OTHER; note = 2'-O-methylcytidine-3'-phosphate
  modified_base 18: mod_base = OTHER; note = 2'-O-methyluridine-3'-phosphate
  modified_base 19: mod_base = OTHER; note = 2'-O-methyladenosine-3'-phosphate
  modified_base 20: mod_base = OTHER; note = 2'-O-methylguanosine-3'-phosphate
  modified_base 21: mod_base = OTHER; note = 2'-O-methylguanosine-3'-phosphorothioate
  modified_base 22: mod_base = OTHER; note = 2'-O-methylguanosine-3'-phosphorothioate
  modified_base 23: mod_base = OTHER; note = 2'-O-methyladenosine
actggagcagctgcctctaggga

SEQ ID NO: 528 - RNA, 23 nt, synthetic construct
  source 1..23: mol_type = other RNA
tccctagaggcagctgctccagg

SEQ ID NO: 529 - RNA, 21 nt, synthetic construct
  source 1..21: mol_type = other RNA
  modified_base 1: mod_base = OTHER; note = 2'-O-methyluridine-3'-phosphorothioate
  modified_base 2: mod_base = OTHER; note = 2'-O-methylguanosine-3'-phosphorothioate
  modified_base 3: mod_base = OTHER; note = 2'-O-methyluridine-3'-phosphate
  modified_base 4: mod_base = OTHER; note = 2'-O-methyladenosine-3'-phosphate
  modified_base 5: mod_base = OTHER; note = 2'-O-methylguanosine-3'-phosphate
  modified_base 6: mod_base = OTHER; note = 2'-O-methylguanosine-3'-phosphate
  modified_base 7: mod_base = OTHER; note = 2'-deoxy-2'-fluorouridine-3'-phosphate
  modified_base 8: mod_base = OTHER; note = 2'-O-methyluridine-3'-phosphate
  modified_base 9: mod_base = OTHER; note = 2'-deoxy-2'-fluoroguanosine-3'-phosphate
  modified_base 10: mod_base = OTHER; note = 2'-deoxy-2'-fluorocytidine-3'-phosphate
  modified_base 11: mod_base = OTHER; note = 2'-deoxy-2'-fluorouridine-3'-phosphate
  modified_base 12: mod_base = OTHER; note = 2'-O-methyluridine-3'-phosphate
  modified_base 13: mod_base = OTHER; note = 2'-O-methyladenosine-3'-phosphate
  modified_base 14: mod_base = OTHER; note = 2'-O-methyladenosine-3'-phosphate
  modified_base 15: mod_base = OTHER; note = 2'-O-methyladenosine-3'-phosphate
  modified_base 16: mod_base = OTHER; note = 2'-O-methyladenosine-3'-phosphate
  modified_base 17: mod_base = OTHER; note = 2'-O-methylguanosine-3'-phosphate
  modified_base 18: mod_base = OTHER; note = 2'-O-methylguanosine-3'-phosphate
  modified_base 19: mod_base = OTHER; note = 2'-O-methylguanosine-3'-phosphate
  modified_base 20: mod_base = OTHER; note = 2'-O-methyladenosine-3'-phosphate
  modified_base 21: mod_base = OTHER; note = 2'-O-methyluridine-3'-phosphate ((2S,4R)-1-[29-[[2-(acetylamino)-2-deoxy-beta-D-galactopyra nosyl]oxy]-14,14-bis[[3-[[3-[[5-[[2-(acetylamino)-2-deoxy-b eta-D-galactopyranosyl]oxy]-1-oxopentyl]amino]propyl]amino] -3-oxopropoxy]methyl]-1,12,19,25-tetraoxo-16-oxa-13,20,24-t riazanonacos-1-yl]-4-hydroxy-2-pyrrolidinyl)methyl ester
tgtaggttgcttaaaagggat

SEQ ID NO: 530 - RNA, 23 nt, synthetic construct
  source 1..23: mol_type = other RNA
  modified_base 1: mod_base = OTHER; note = 2'-O-methyladenosine-3'-phosphorothioate
  modified_base 2: mod_base = OTHER; note = 2'-deoxy-2'-fluorouridine-3'-phosphorothioate
  modified_base 3: mod_base = OTHER; note = 2'-O-methylcytidine-3'-phosphate
  modified_base 4: mod_base = OTHER; note = 2'-O-methylcytidine-3'-phosphate
  modified_base 5: mod_base = OTHER; note = 2'-O-methylcytidine-3'-phosphate
  modified_base 6: mod_base = OTHER; note = 2'-deoxy-2'-fluorouridine-3'-phosphate
  modified_base 7: mod_base = OTHER; note = 2'-O-methyluridine-3'-phosphate
  modified_base 8: mod_base = OTHER; note = 2'-deoxy-2'-fluorouridine-3'-phosphate
  modified_base 9: mod_base = OTHER; note = 2'-deoxy-2'-fluorouridine-3'-phosphate
  modified_base 10: mod_base = OTHER; note = 2'-O-methyladenosine-3'-phosphate
  modified_base 11: mod_base = OTHER; note = 2'-O-methyladenosine-3'-phosphate
  modified_base 12: mod_base = OTHER; note = 2'-O-methylguanosine-3'-phosphate
  modified_base 13: mod_base = OTHER; note = 2'-O-methylcytidine-3'-phosphate
  modified_base 14: mod_base = OTHER; note = 2'-deoxy-2'-fluoroadenosine-3'-phosphate
  modified_base 15: mod_base = OTHER; note = 2'-O-methyladenosine-3'-phosphate
  modified_base 16: mod_base = OTHER; note = 2'-deoxy-2'-fluorocytidine-3'-phosphate
  modified_base 17: mod_base = OTHER; note = 2'-O-methylcytidine-3'-phosphate
  modified_base 18: mod_base = OTHER; note = 2'-O-methyluridine-3'-phosphate
  modified_base 19: mod_base = OTHER; note = 2'-O-methyladenosine-3'-phosphate
  modified_base 20: mod_base = OTHER; note = 2'-O-methylcytidine-3'-phosphate
  modified_base 21: mod_base = OTHER; note = 2'-O-methyladenosine-3'-phosphorothioate
  modified_base 22: mod_base = OTHER; note = 2'-O-methylguanosine-3'-phosphorothioate
  modified_base 23: mod_base = OTHER; note = 2'-O-methylguanosine
atcccttttaagcaacctacagg

SEQ ID NO: 531 - RNA, 23 nt, synthetic construct
  source 1..23: mol_type = other RNA
cctgtaggttgcttaaaagggac

SEQ ID NO: 532 - RNA, 21 nt, synthetic construct
  source 1..21: mol_type = other RNA
  modified_base 1: mod_base = OTHER; note = 2'-O-methyladenosine-3'-phosphorothioate
  modified_base 2: mod_base = OTHER; note = 2'-O-methyladenosine-3'-phosphorothioate
  modified_base 3: mod_base = OTHER; note = 2'-O-methyladenosine-3'-phosphate
  modified_base 4: mod_base = OTHER; note = 2'-O-methylguanosine-3'-phosphate
  modified_base 5: mod_base = OTHER; note = 2'-O-methyladenosine-3'-phosphate
  modified_base 6: mod_base = OTHER; note = 2'-O-methylcytidine-3'-phosphate
  modified_base 7: mod_base = OTHER; note = 2'-deoxy-2'-fluorouridine-3'-phosphate
  modified_base 8: mod_base = OTHER; note = 2'-O-methyladenosine-3'-phosphate
  modified_base 9: mod_base = OTHER; note = 2'-deoxy-2'-fluorocytidine-3'-phosphate
  modified_base 10: mod_base = OTHER; note = 2'-deoxy-2'-fluorouridine-3'-phosphate
  modified_base 11: mod_base = OTHER; note = 2'-deoxy-2'-fluoroguanosine-3'-phosphate
  modified_base 12: mod_base = OTHER; note = 2'-O-methylguanosine-3'-phosphate
  modified_base 13: mod_base = OTHER; note = 2'-O-methyladenosine-3'-phosphate
  modified_base 14: mod_base = OTHER; note = 2'-O-methylguanosine-3'-phosphate
  modified_base 15: mod_base = OTHER; note = 2'-O-methylcytidine-3'-phosphate
  modified_base 16: mod_base = OTHER; note = 2'-O-methyladenosine-3'-phosphate
  modified_base 17: mod_base = OTHER; note = 2'-O-methylcytidine-3'-phosphate
  modified_base 18: mod_base = OTHER; note = 2'-O-methylcytidine-3'-phosphate
  modified_base 19: mod_base = OTHER; note = 2'-O-methylguanosine-3'-phosphate
  modified_base 20: mod_base = OTHER; note = 2'-O-methyluridine-3'-phosphate
  modified_base 21: mod_base = OTHER; note = 2'-O-methyluridine-3'-phosphate ((2S,4R)-1-[29-[[2-(acetylamino)-2-deoxy-beta-D-galactopyra nosyl]oxy]-14,14-bis[[3-[[3-[[5-[[2-(acetylamino)-2-deoxy-b eta-D-galactopyranosyl]oxy]-1-oxopentyl]amino]propyl]amino] -3-oxopropoxy]methyl]-1,12,19,25-tetraoxo-16-oxa-13,20,24-t riazanonacos-1-yl]-4-hydroxy-2-pyrrolidinyl)methyl ester
aaagactactggagcaccgtt

SEQ ID NO: 533 - RNA, 23 nt, synthetic construct
  source 1..23: mol_type = other RNA
  modified_base 1: mod_base = OTHER; note = 2'-O-methyladenosine-3'-phosphorothioate
  modified_base 2: mod_base = OTHER; note = 2'-deoxy-2'-fluoroadenosine-3'-phosphorothioate
  modified_base 3: mod_base = OTHER; note = 2'-O-methylcytidine-3'-phosphate
  modified_base 4: mod_base = OTHER; note = 2'-O-methylguanosine-3'-phosphate
  modified_base 5: mod_base = OTHER; note = 2'-O-methylguanosine-3'-phosphate
  modified_base 6: mod_base = OTHER; note = 2'-deoxy-2'-fluorouridine-3'-phosphate
  modified_base 7: mod_base = OTHER; note = 2'-O-methylguanosine-3'-phosphate
  modified_base 8: mod_base = OTHER; note = 2'-deoxy-2'-fluorocytidine-3'-phosphate
  modified_base 9: mod_base = OTHER; note = 2'-deoxy-2'-fluorouridine-3'-phosphate
  modified_base 10: mod_base = OTHER; note = 2'-O-methylcytidine-3'-phosphate
  modified_base 11: mod_base = OTHER; note = 2'-O-methylcytidine-3'-phosphate
  modified_base 12: mod_base = OTHER; note = 2'-O-methyladenosine-3'-phosphate
  modified_base 13: mod_base = OTHER; note = 2'-O-methylguanosine-3'-phosphate
  modified_base 14: mod_base = OTHER; note = 2'-deoxy-2'-fluorouridine-3'-phosphate
  modified_base 15: mod_base = OTHER; note = 2'-O-methyladenosine-3'-phosphate
  modified_base 16: mod_base = OTHER; note = 2'-deoxy-2'-fluoroguanosine-3'-phosphate
  modified_base 17: mod_base = OTHER; note = 2'-O-methyluridine-3'-phosphate
  modified_base 18: mod_base = OTHER; note = 2'-O-methylcytidine-3'-phosphate
  modified_base 19: mod_base = OTHER; note = 2'-O-methyluridine-3'-phosphate
  modified_base 20: mod_base = OTHER; note = 2'-O-methyluridine-3'-phosphate
  modified_base 21: mod_base = OTHER; note = 2'-O-methyluridine-3'-phosphorothioate
  modified_base 22: mod_base = OTHER; note = 2'-O-methylcytidine-3'-phosphorothioate
  modified_base 23: mod_base = OTHER; note = 2'-O-methyladenosine
aacggtgctccagtagtctttca

SEQ ID NO: 534 - RNA, 23 nt, synthetic construct
  source 1..23: mol_type = other RNA
tgaaagactactggagcaccgtt

SEQ ID NO: 535 - RNA, 21 nt, synthetic construct
  source 1..21: mol_type = other RNA
  modified_base 1: mod_base = OTHER; note = 2'-O-methyladenosine-3'-phosphorothioate
  modified_base 2: mod_base = OTHER; note = 2'-O-methylguanosine-3'-phosphorothioate
  modified_base 3: mod_base = OTHER; note = 2'-O-methylguanosine-3'-phosphate
  modified_base 4: mod_base = OTHER; note = 2'-O-methylcytidine-3'-phosphate
  modified_base 5: mod_base = OTHER; note = 2'-O-methyladenosine-3'-phosphate
  modified_base 6: mod_base = OTHER; note = 2'-O-methylguanosine-3'-phosphate
  modified_base 7: mod_base = OTHER; note = 2'-deoxy-2'-fluorocytidine-3'-phosphate
  modified_base 8: mod_base = OTHER; note = 2'-O-methyluridine-3'-phosphate
  modified_base 9: mod_base = OTHER; note = 2'-deoxy-2'-fluoroguanosine-3'-phosphate
  modified_base 10: mod_base = OTHER; note = 2'-deoxy-2'-fluorocytidine-3'-phosphate
  modified_base 11: mod_base = OTHER; note = 2'-deoxy-2'-fluorouridine-3'-phosphate
  modified_base 12: mod_base = OTHER; note = 2'-O-methylcytidine-3'-phosphate
  modified_base 13: mod_base = OTHER; note = 2'-O-methylcytidine-3'-phosphate
  modified_base 14: mod_base = OTHER; note = 2'-O-methyladenosine-3'-phosphate
  modified_base 15: mod_base = OTHER; note = 2'-O-methylguanosine-3'-phosphate
  modified_base 16: mod_base = OTHER; note = 2'-O-methylguanosine-3'-phosphate
  modified_base 17: mod_base = OTHER; note = 2'-O-methyladenosine-3'-phosphate
  modified_base 18: mod_base = OTHER; note = 2'-O-methyladenosine-3'-phosphate
  modified_base 19: mod_base = OTHER; note = 2'-O-methylcytidine-3'-phosphate
  modified_base 20: mod_base = OTHER; note = 2'-O-methyladenosine-3'-phosphate
  modified_base 21: mod_base = OTHER; note = 2'-O-methyluridine-3'-phosphate ((2S,4R)-1-[29-[[2-(acetylamino)-2-deoxy-beta-D-galactopyra nosyl]oxy]-14,14-bis[[3-[[3-[[5-[[2-(acetylamino)-2-deoxy-b eta-D-galactopyranosyl]oxy]-1-oxopentyl]amino]propyl]amino] -3-oxopropoxy]methyl]-1,12,19,25-tetraoxo-16-oxa-13,20,24-t riazanonacos-1-yl]-4-hydroxy-2-pyrrolidinyl)methyl ester
aggcagctgctccaggaacat

SEQ ID NO: 536 - RNA, 23 nt, synthetic construct
  source 1..23: mol_type = other RNA
  modified_base 1: mod_base = OTHER; note = 2'-O-methyladenosine-3'-phosphorothioate
  modified_base 2: mod_base = OTHER; note = 2'-deoxy-2'-fluorouridine-3'-phosphorothioate
  modified_base 3: mod_base = OTHER; note = 2'-O-methylguanosine-3'-phosphate
  modified_base 4: mod_base = OTHER; note = 2'-O-methyluridine-3'-phosphate
  modified_base 5: mod_base = OTHER; note = 2'-O-methyluridine-3'-phosphate
  modified_base 6: mod_base = OTHER; note = 2'-deoxy-2'-fluorocytidine-3'-phosphate
  modified_base 7: mod_base = OTHER; note = 2'-O-methylcytidine-3'-phosphate
  modified_base 8: mod_base = OTHER; note = 2'-deoxy-2'-fluorouridine-3'-phosphate
  modified_base 9: mod_base = OTHER; note = 2'-deoxy-2'-fluoroguanosine-3'-phosphate
  modified_base 10: mod_base = OTHER; note = 2'-O-methylguanosine-3'-phosphate
  modified_base 11: mod_base = OTHER; note = 2'-O-methyladenosine-3'-phosphate
  modified_base 12: mod_base = OTHER; note = 2'-O-methylguanosine-3'-phosphate
  modified_base 13: mod_base = OTHER; note = 2'-O-methylcytidine-3'-phosphate
  modified_base 14: mod_base = OTHER; note = 2'-deoxy-2'-fluoroadenosine-3'-phosphate
  modified_base 15: mod_base = OTHER; note = 2'-O-methylguanosine-3'-phosphate
  modified_base 16: mod_base = OTHER; note = 2'-deoxy-2'-fluorocytidine-3'-phosphate
  modified_base 17: mod_base = OTHER; note = 2'-O-methyluridine-3'-phosphate
  modified_base 18: mod_base = OTHER; note = 2'-O-methylguanosine-3'-phosphate
  modified_base 19: mod_base = OTHER; note = 2'-O-methylcytidine-3'-phosphate
  modified_base 20: mod_base = OTHER; note = 2'-O-methylcytidine-3'-phosphate
  modified_base 21: mod_base = OTHER; note = 2'-O-methyluridine-3'-phosphorothioate
  modified_base 22: mod_base = OTHER; note = 2'-O-methylcytidine-3'-phosphorothioate
  modified_base 23: mod_base = OTHER; note = 2'-O-methyluridine
atgttcctggagcagctgcctct

SEQ ID NO: 537 - RNA, 23 nt, synthetic construct
  source 1..23: mol_type = other RNA
agaggcagctgctccaggaacag

SEQ ID NO: 538 - RNA, 21 nt, synthetic construct
  source 1..21: mol_type = other RNA
  modified_base 1: mod_base = OTHER; note = 2'-O-methylguanosine-3'-phosphorothioate
  modified_base 2: mod_base = OTHER; note = 2'-O-methylcytidine-3'-phosphorothioate
  modified_base 3: mod_base = OTHER; note = 2'-O-methyladenosine-3'-phosphate
  modified_base 4: mod_base = OTHER; note = 2'-O-methylguanosine-3'-phosphate
  modified_base 5: mod_base = OTHER; note = 2'-O-methylcytidine-3'-phosphate
  modified_base 6: mod_base = OTHER; note = 2'-O-methyluridine-3'-phosphate
  modified_base 7: mod_base = OTHER; note = 2'-deoxy-2'-fluoroguanosine-3'-phosphate
  modified_base 8: mod_base = OTHER; note = 2'-O-methylcytidine-3'-phosphate
  modified_base 9: mod_base = OTHER; note = 2'-deoxy-2'-fluorouridine-3'-phosphate
  modified_base 10: mod_base = OTHER; note = 2'-deoxy-2'-fluorocytidine-3'-phosphate
  modified_base 11: mod_base = OTHER; note = 2'-deoxy-2'-fluorocytidine-3'-phosphate
  modified_base 12: mod_base = OTHER; note = 2'-O-methyladenosine-3'-phosphate
  modified_base 13: mod_base = OTHER; note = 2'-O-methylguanosine-3'-phosphate
  modified_base 14: mod_base = OTHER; note = 2'-O-methylguanosine-3'-phosphate
  modified_base 15: mod_base = OTHER; note = 2'-O-methyladenosine-3'-phosphate
  modified_base 16: mod_base = OTHER; note = 2'-O-methyladenosine-3'-phosphate
  modified_base 17: mod_base = OTHER; note = 2'-O-methylcytidine-3'-phosphate
  modified_base 18: mod_base = OTHER; note = 2'-O-methyladenosine-3'-phosphate
  modified_base 19: mod_base = OTHER; note = 2'-O-methylguanosine-3'-phosphate
  modified_base 20: mod_base = OTHER; note = 2'-O-methyladenosine-3'-phosphate
  modified_base 21: mod_base = OTHER; note = 2'-O-methyluridine-3'-phosphate ((2S,4R)-1-[29-[[2-(acetylamino)-2-deoxy-beta-D-galactopyra nosyl]oxy]-14,14-bis[[3-[[3-[[5-[[2-(acetylamino)-2-deoxy-b eta-D-galactopyranosyl]oxy]-1-oxopentyl]amino]propyl]amino] -3-oxopropoxy]methyl]-1,12,19,25-tetraoxo-16-oxa-13,20,24-t riazanonacos-1-yl]-4-hydroxy-2-pyrrolidinyl)methyl ester
gcagctgctccaggaacagat

SEQ ID NO: 539 - RNA, 23 nt, synthetic construct
  source 1..23: mol_type = other RNA
  modified_base 1: mod_base = OTHER; note = 2'-O-methyladenosine-3'-phosphorothioate
  modified_base 2: mod_base = OTHER; note = 2'-deoxy-2'-fluorouridine-3'-phosphorothioate
  modified_base 3: mod_base = OTHER; note = 2'-O-methylcytidine-3'-phosphate
  modified_base 4: mod_base = OTHER; note = 2'-O-methyluridine-3'-phosphate
  modified_base 5: mod_base = OTHER; note = 2'-O-methylguanosine-3'-phosphate
  modified_base 6: mod_base = OTHER; note = 2'-deoxy-2'-fluorouridine-3'-phosphate
  modified_base 7: mod_base = OTHER; note = 2'-O-methyluridine-3'-phosphate
  modified_base 8: mod_base = OTHER; note = 2'-deoxy-2'-fluorocytidine-3'-phosphate
  modified_base 9: mod_base = OTHER; note = 2'-deoxy-2'-fluorocytidine-3'-phosphate
  modified_base 10: mod_base = OTHER; note = 2'-O-methyluridine-3'-phosphate
  modified_base 11: mod_base = OTHER; note = 2'-O-methylguanosine-3'-phosphate
  modified_base 12: mod_base = OTHER; note = 2'-O-methylguanosine-3'-phosphate
  modified_base 13: mod_base = OTHER; note = 2'-O-methyladenosine-3'-phosphate
  modified_base 14: mod_base = OTHER; note = 2'-deoxy-2'-fluoroguanosine-3'-phosphate
  modified_base 15: mod_base = OTHER; note = 2'-O-methylcytidine-3'-phosphate
  modified_base 16: mod_base = OTHER; note = 2'-deoxy-2'-fluoroadenosine-3'-phosphate
  modified_base 17: mod_base = OTHER; note = 2'-O-methylguanosine-3'-phosphate
  modified_base 18: mod_base = OTHER; note = 2'-O-methylcytidine-3'-phosphate
  modified_base 19: mod_base = OTHER; note = 2'-O-methyluridine-3'-phosphate
  modified_base 20: mod_base = OTHER; note = 2'-O-methylguanosine-3'-phosphate
  modified_base 21: mod_base = OTHER; note = 2'-O-methylcytidine-3'-phosphorothioate
  modified_base 22: mod_base = OTHER; note = 2'-O-methylcytidine-3'-phosphorothioate
  modified_base 23: mod_base = OTHER; note = 2'-O-methyluridine
atctgttcctggagcagctgcct

SEQ ID NO: 540 - RNA, 23 nt, synthetic construct
  source 1..23: mol_type = other RNA
aggcagctgctccaggaacagag

SEQ ID NO: 541 - RNA, 21 nt, synthetic construct
  source 1..21: mol_type = other RNA
  modified_base 1: mod_base = OTHER; note = 2'-O-methylcytidine-3'-phosphorothioate
  modified_base 2: mod_base = OTHER; note = 2'-O-methylguanosine-3'-phosphorothioate
  modified_base 3: mod_base = OTHER; note = 2'-O-methylcytidine-3'-phosphate
  modified_base 4: mod_base = OTHER; note = 2'-O-methylcytidine-3'-phosphate
  modified_base 5: mod_base = OTHER; note = 2'-O-methyladenosine-3'-phosphate
  modified_base 6: mod_base = OTHER; note = 2'-O-methylcytidine-3'-phosphate
  modified_base 7: mod_base = OTHER; note = 2'-deoxy-2'-fluorocytidine-3'-phosphate
  modified_base 8: mod_base = OTHER; note = 2'-O-methyladenosine-3'-phosphate
  modified_base 9: mod_base = OTHER; note = 2'-deoxy-2'-fluoroadenosine-3'-phosphate
  modified_base 10: mod_base = OTHER; note = 2'-deoxy-2'-fluoroguanosine-3'-phosphate
  modified_base 11: mod_base = OTHER; note = 2'-deoxy-2'-fluoroadenosine-3'-phosphate
  modified_base 12: mod_base = OTHER; note = 2'-O-methylcytidine-3'-phosphate
  modified_base 13: mod_base = OTHER; note = 2'-O-methylcytidine-3'-phosphate
  modified_base 14: mod_base = OTHER; note = 2'-O-methylguanosine-3'-phosphate
  modified_base 15: mod_base = OTHER; note = 2'-O-methylcytidine-3'-phosphate
  modified_base 16: mod_base = OTHER; note = 2'-O-methylcytidine-3'-phosphate
  modified_base 17: mod_base = OTHER; note = 2'-O-methyladenosine-3'-phosphate
  modified_base 18: mod_base = OTHER; note = 2'-O-methyladenosine-3'-phosphate
  modified_base 19: mod_base = OTHER; note = 2'-O-methylguanosine-3'-phosphate
  modified_base 20: mod_base = OTHER; note = 2'-O-methylguanosine-3'-phosphate
  modified_base 21: mod_base = OTHER; note = 2'-O-methyluridine-3'-phosphate ((2S,4R)-1-[29-[[2-(acetylamino)-2-deoxy-beta-D-galactopyra nosyl]oxy]-14,14-bis[[3-[[3-[[5-[[2-(acetylamino)-2-deoxy-b eta-D-galactopyranosyl]oxy]-1-oxopentyl]amino]propyl]amino] -3-oxopropoxy]methyl]-1,12,19,25-tetraoxo-16-oxa-13,20,24-t riazanonacos-1-yl]-4-hydroxy-2-pyrrolidinyl)methyl ester
cgccaccaagaccgccaaggt

SEQ ID NO: 542 - RNA, 23 nt, synthetic construct
  source 1..23: mol_type = other RNA
  modified_base 1: mod_base = OTHER; note = 2'-O-methyladenosine-3'-phosphorothioate
  modified_base 2: mod_base = OTHER; note = 2'-deoxy-2'-fluorocytidine-3'-phosphorothioate
  modified_base 3: mod_base = OTHER; note = 2'-O-methylcytidine-3'-phosphate
  modified_base 4: mod_base = OTHER; note = 2'-O-methyluridine-3'-phosphate
  modified_base 5: mod_base = OTHER; note = 2'-O-methyluridine-3'-phosphate
  modified_base 6: mod_base = OTHER; note = 2'-deoxy-2'-fluoroguanosine-3'-phosphate
  modified_base 7: mod_base = OTHER; note = 2'-O-methylguanosine-3'-phosphate
  modified_base 8: mod_base = OTHER; note = 2'-deoxy-2'-fluorocytidine-3'-phosphate
  modified_base 9: mod_base = OTHER; note = 2'-deoxy-2'-fluoroguanosine-3'-phosphate
  modified_base 10: mod_base = OTHER; note = 2'-O-methylguanosine-3'-phosphate
  modified_base 11: mod_base = OTHER; note = 2'-O-methyluridine-3'-phosphate
  modified_base 12: mod_base = OTHER; note = 2'-O-methylcytidine-3'-phosphate
  modified_base 13: mod_base = OTHER; note = 2'-O-methyluridine-3'-phosphate
  modified_base 14: mod_base = OTHER; note = 2'-deoxy-2'-fluorouridine-3'-phosphate
  modified_base 15: mod_base = OTHER; note = 2'-O-methylguanosine-3'-phosphate
  modified_base 16: mod_base = OTHER; note = 2'-deoxy-2'-fluoroguanosine-3'-phosphate
  modified_base 17: mod_base = OTHER; note = 2'-O-methyluridine-3'-phosphate
  modified_base 18: mod_base = OTHER; note = 2'-O-methylguanosine-3'-phosphate
  modified_base 19: mod_base = OTHER; note = 2'-O-methylguanosine-3'-phosphate
  modified_base 20: mod_base = OTHER; note = 2'-O-methylcytidine-3'-phosphate
  modified_base 21: mod_base = OTHER; note = 2'-O-methylguanosine-3'-phosphorothioate
  modified_base 22: mod_base = OTHER; note = 2'-O-methyluridine-3'-phosphorothioate
  modified_base 23: mod_base = OTHER; note = 2'-O-methylguanosine
accttggcggtcttggtggcgtg

SEQ ID NO: 543 - RNA, 23 nt, synthetic construct
  source 1..23: mol_type = other RNA
cacgccaccaagaccgccaagga

SEQ ID NO: 544 - RNA, 21 nt, synthetic construct
  source 1..21: mol_type = other RNA
  modified_base 1: mod_base = OTHER; note = 2'-O-methylcytidine-3'-phosphorothioate
  modified_base 2: mod_base = OTHER; note = 2'-O-methyluridine-3'-phosphorothioate
  modified_base 3: mod_base = OTHER; note = 2'-O-methyladenosine-3'-phosphate
  modified_base 4: mod_base = OTHER; note = 2'-O-methylcytidine-3'-phosphate
  modified_base 5: mod_base = OTHER; note = 2'-O-methyluridine-3'-phosphate
  modified_base 6: mod_base = OTHER; note = 2'-O-methylguanosine-3'-phosphate
  modified_base 7: mod_base = OTHER; note = 2'-deoxy-2'-fluoroguanosine-3'-phosphate
  modified_base 8: mod_base = OTHER; note = 2'-O-methyladenosine-3'-phosphate
  modified_base 9: mod_base = OTHER; note = 2'-deoxy-2'-fluoroguanosine-3'-phosphate
  modified_base 10: mod_base = OTHER; note = 2'-deoxy-2'-fluorocytidine-3'-phosphate
  modified_base 11: mod_base = OTHER; note = 2'-deoxy-2'-fluoroadenosine-3'-phosphate
  modified_base 12: mod_base = OTHER; note = 2'-O-methylcytidine-3'-phosphate
  modified_base 13: mod_base = OTHER; note = 2'-O-methylcytidine-3'-phosphate
  modified_base 14: mod_base = OTHER; note = 2'-O-methylguanosine-3'-phosphate
  modified_base 15: mod_base = OTHER; note = 2'-O-methyluridine-3'-phosphate
  modified_base 16: mod_base = OTHER; note = 2'-O-methyluridine-3'-phosphate
  modified_base 17: mod_base = OTHER; note = 2'-O-methyladenosine-3'-phosphate
  modified_base 18: mod_base = OTHER; note = 2'-O-methyladenosine-3'-phosphate
  modified_base 19: mod_base = OTHER; note = 2'-O-methylguanosine-3'-phosphate
  modified_base 20: mod_base = OTHER; note = 2'-O-methylguanosine-3'-phosphate
  modified_base 21: mod_base = OTHER; note = 2'-O-methyluridine-3'-phosphate ((2S,4R)-1-[29-[[2-(acetylamino)-2-deoxy-beta-D-galactopyra nosyl]oxy]-14,14-bis[[3-[[3-[[5-[[2-(acetylamino)-2-deoxy-b eta-D-galactopyranosyl]oxy]-1-oxopentyl]amino]propyl]amino] -3-oxopropoxy]methyl]-1,12,19,25-tetraoxo-16-oxa-13,20,24-t riazanonacos-1-yl]-4-hydroxy-2-pyrrolidinyl)methyl ester
ctactggagcaccgttaaggt

SEQ ID NO: 545 - RNA, 23 nt, synthetic construct
  source 1..23: mol_type = other RNA
  modified_base 1: mod_base = OTHER; note = 2'-O-methyladenosine-3'-phosphorothioate
  modified_base 2: mod_base = OTHER; note = 2'-deoxy-2'-fluorocytidine-3'-phosphorothioate
  modified_base 3: mod_base = OTHER; note = 2'-O-methylcytidine-3'-phosphate
  modified_base 4: mod_base = OTHER; note = 2'-O-methyluridine-3'-phosphate
  modified_base 5: mod_base = OTHER; note = 2'-O-methyluridine-3'-phosphate
  modified_base 6: mod_base = OTHER; note = 2'-deoxy-2'-fluoroadenosine-3'-phosphate
  modified_base 7: mod_base = OTHER; note = 2'-O-methyladenosine-3'-phosphate
  modified_base 8: mod_base = OTHER; note = 2'-deoxy-2'-fluorocytidine-3'-phosphate
  modified_base 9: mod_base = OTHER; note = 2'-deoxy-2'-fluoroguanosine-3'-phosphate
  modified_base 10: mod_base = OTHER; note = 2'-O-methylguanosine-3'-phosphate
  modified_base 11: mod_base = OTHER; note = 2'-O-methyluridine-3'-phosphate
  modified_base 12: mod_base = OTHER; note = 2'-O-methylguanosine-3'-phosphate
  modified_base 13: mod_base = OTHER; note = 2'-O-methylcytidine-3'-phosphate
  modified_base 14: mod_base = OTHER; note = 2'-deoxy-2'-fluorouridine-3'-phosphate
  modified_base 15: mod_base = OTHER; note = 2'-O-methylcytidine-3'-phosphate
  modified_base 16: mod_base = OTHER; note = 2'-deoxy-2'-fluorocytidine-3'-phosphate
  modified_base 17: mod_base = OTHER; note = 2'-O-methyladenosine-3'-phosphate
  modified_base 18: mod_base = OTHER; note = 2'-O-methylguanosine-3'-phosphate
  modified_base 19: mod_base = OTHER; note = 2'-O-methyluridine-3'-phosphate
  modified_base 20: mod_base = OTHER; note = 2'-O-methyladenosine-3'-phosphate
  modified_base 21: mod_base = OTHER; note = 2'-O-methylguanosine-3'-phosphorothioate
  modified_base 22: mod_base = OTHER; note = 2'-O-methyluridine-3'-phosphorothioate
  modified_base 23: mod_base = OTHER; note = 2'-O-methylcytidine
accttaacggtgctccagtagtc

SEQ ID NO: 546 - RNA, 23 nt, synthetic construct
  source 1..23: mol_type = other RNA
gactactggagcaccgttaagga

SEQ ID NO: 547 - RNA, 21 nt, synthetic construct
  source 1..21: mol_type = other RNA
  modified_base 1: mod_base = OTHER; note = 2'-O-methyluridine-3'-phosphorothioate
  modified_base 2: mod_base = OTHER; note = 2'-O-methylguanosine-3'-phosphorothioate
  modified_base 3: mod_base = OTHER; note = 2'-O-methylguanosine-3'-phosphate
  modified_base 4: mod_base = OTHER; note = 2'-O-methylcytidine-3'-phosphate
  modified_base 5: mod_base = OTHER; note = 2'-O-methyluridine-3'-phosphate
  modified_base 6: mod_base = OTHER; note = 2'-O-methylguanosine-3'-phosphate
  modified_base 7: mod_base = OTHER; note = 2'-deoxy-2'-fluorocytidine-3'-phosphate
  modified_base 8: mod_base = OTHER; note = 2'-O-methylcytidine-3'-phosphate
  modified_base 9: mod_base = OTHER; note = 2'-deoxy-2'-fluorouridine-3'-phosphate
  modified_base 10: mod_base = OTHER; note = 2'-deoxy-2'-fluoroguanosine-3'-phosphate
  modified_base 11: mod_base = OTHER; note = 2'-deoxy-2'-fluoroadenosine-3'-phosphate
  modified_base 12: mod_base = OTHER; note = 2'-O-methylguanosine-3'-phosphate
  modified_base 13: mod_base = OTHER; note = 2'-O-methyladenosine-3'-phosphate
  modified_base 14: mod_base = OTHER; note = 2'-O-methylcytidine-3'-phosphate
  modified_base 15: mod_base = OTHER; note = 2'-O-methylcytidine-3'-phosphate
  modified_base 16: mod_base = OTHER; note = 2'-O-methyluridine-3'-phosphate
  modified_base 17: mod_base = OTHER; note = 2'-O-methylcytidine-3'-phosphate
  modified_base 18: mod_base = OTHER; note = 2'-O-methyladenosine-3'-phosphate
  modified_base 19: mod_base = OTHER; note = 2'-O-methyladenosine-3'-phosphate
  modified_base 20: mod_base = OTHER; note = 2'-O-methyluridine-3'-phosphate
  modified_base 21: mod_base = OTHER; note = 2'-O-methyluridine-3'-phosphate ((2S,4R)-1-[29-[[2-(acetylamino)-2-deoxy-beta-D-galactopyra nosyl]oxy]-14,14-bis[[3-[[3-[[5-[[2-(acetylamino)-2-deoxy-b eta-D-galactopyranosyl]oxy]-1-oxopentyl]amino]propyl]amino] -3-oxopropoxy]methyl]-1,12,19,25-tetraoxo-16-oxa-13,20,24-t riazanonacos-1-yl]-4-hydroxy-2-pyrrolidinyl)methyl ester
tggctgcctgagacctcaatt

SEQ ID NO: 548 - RNA, 23 nt, synthetic construct
  source 1..23: mol_type = other RNA
  modified_base 1: mod_base = OTHER; note = 2'-O-methyladenosine-3'-phosphorothioate
  modified_base 2: mod_base = OTHER; note = 2'-deoxy-2'-fluoroadenosine-3'-phosphorothioate
  modified_base 3: mod_base = OTHER; note = 2'-O-methyluridine-3'-phosphate
  modified_base 4: mod_base = OTHER; note = 2'-O-methyluridine-3'-phosphate
  modified_base 5: mod_base = OTHER; note = 2'-O-methylguanosine-3'-phosphate
  modified_base 6: mod_base = OTHER; note = 2'-deoxy-2'-fluoroadenosine-3'-phosphate
  modified_base 7: mod_base = OTHER; note = 2'-O-methylguanosine-3'-phosphate
  modified_base 8: mod_base = OTHER; note = 2'-deoxy-2'-fluoroguanosine-3'-phosphate
  modified_base 9: mod_base = OTHER; note = 2'-deoxy-2'-fluorouridine-3'-phosphate
  modified_base 10: mod_base = OTHER; note = 2'-O-methylcytidine-3'-phosphate
  modified_base 11: mod_base = OTHER; note = 2'-O-methyluridine-3'-phosphate
  modified_base 12: mod_base = OTHER; note = 2'-O-methylcytidine-3'-phosphate
  modified_base 13: mod_base = OTHER; note = 2'-O-methyladenosine-3'-phosphate
  modified_base 14: mod_base = OTHER; note = 2'-deoxy-2'-fluoroguanosine-3'-phosphate
  modified_base 15: mod_base = OTHER; note = 2'-O-methylguanosine-3'-phosphate
  modified_base 16: mod_base = OTHER; note = 2'-deoxy-2'-fluorocytidine-3'-phosphate
  modified_base 17: mod_base = OTHER; note = 2'-O-methyladenosine-3'-phosphate
  modified_base 18: mod_base = OTHER; note = 2'-O-methylguanosine-3'-phosphate
  modified_base 19: mod_base = OTHER; note = 2'-O-methylcytidine-3'-phosphate
  modified_base 20: mod_base = OTHER; note = 2'-O-methylcytidine-3'-phosphate
  modified_base 21: mod_base = OTHER; note = 2'-O-methyladenosine-3'-phosphorothioate
  modified_base 22: mod_base = OTHER; note = 2'-O-methylcytidine-3'-phosphorothioate
  modified_base 23: mod_base = OTHER; note = 2'-O-methylguanosine
aattgaggtctcaggcagccacg

SEQ ID NO: 549 - RNA, 23 nt, synthetic construct
  source 1..23: mol_type = other RNA
cgtggctgcctgagacctcaata

SEQ ID NO: 550 - RNA, 21 nt, synthetic construct
  source 1..21: mol_type = other RNA
  modified_base 1: mod_base = OTHER; note = 2'-O-methylguanosine-3'-phosphorothioate
  modified_base 2: mod_base = OTHER; note = 2'-O-methylguanosine-3'-phosphorothioate
  modified_base 3: mod_base = OTHER; note = 2'-O-methylcytidine-3'-phosphate
  modified_base 4: mod_base = OTHER; note = 2'-O-methyluridine-3'-phosphate
  modified_base 5: mod_base = OTHER; note = 2'-O-methyluridine-3'-phosphate
  modified_base 6: mod_base = OTHER; note = 2'-O-methylcytidine-3'-phosphate
  modified_base 7: mod_base = OTHER; note = 2'-deoxy-2'-fluoroadenosine-3'-phosphate
  modified_base 8: mod_base = OTHER; note = 2'-O-methylguanosine-3'-phosphate
  modified_base 9: mod_base = OTHER; note = 2'-deoxy-2'-fluorouridine-3'-phosphate
  modified_base 10: mod_base = OTHER; note = 2'-deoxy-2'-fluorouridine-3'-phosphate
  modified_base 11: mod_base = OTHER; note = 2'-deoxy-2'-fluorocytidine-3'-phosphate
  modified_base 12: mod_base = OTHER; note = 2'-O-methylcytidine-3'-phosphate
  modified_base 13: mod_base = OTHER; note = 2'-O-methylcytidine-3'-phosphate
  modified_base 14: mod_base = OTHER; note = 2'-O-methyluridine-3'-phosphate
  modified_base 15: mod_base = OTHER; note = 2'-O-methylguanosine-3'-phosphate
  modified_base 16: mod_base = OTHER; note = 2'-O-methyladenosine-3'-phosphate
  modified_base 17: mod_base = OTHER; note = 2'-O-methyladenosine-3'-phosphate
  modified_base 18: mod_base = OTHER; note = 2'-O-methyladenosine-3'-phosphate
  modified_base 19: mod_base = OTHER; note = 2'-O-methylguanosine-3'-phosphate
  modified_base 20: mod_base = OTHER; note = 2'-O-methyladenosine-3'-phosphate
  modified_base 21: mod_base = OTHER; note = 2'-O-methyluridine-3'-phosphate ((2S,4R)-1-[29-[[2-(acetylamino)-2-deoxy-beta-D-galactopyra nosyl]oxy]-14,14-bis[[3-[[3-[[5-[[2-(acetylamino)-2-deoxy-b eta-D-galactopyranosyl]oxy]-1-oxopentyl]amino]propyl]amino] -3-oxopropoxy]methyl]-1,12,19,25-tetraoxo-16-oxa-13,20,24-t riazanonacos-1-yl]-4-hydroxy-2-pyrrolidinyl)methyl ester
ggcttcagttccctgaaagat

SEQ ID NO: 551 - RNA, 23 nt, synthetic construct
  source 1..23: mol_type = other RNA
  modified_base 1: mod_base = OTHER; note = 2'-O-methyladenosine-3'-phosphorothioate
  modified_base 2: mod_base = OTHER; note = 2'-deoxy-2'-fluorouridine-3'-phosphorothioate
  modified_base 3: mod_base = OTHER; note = 2'-O-methylcytidine-3'-phosphate
  modified_base 4: mod_base = OTHER; note = 2'-O-methyluridine-3'-phosphate
  modified_base 5: mod_base = OTHER; note = 2'-O-methyluridine-3'-phosphate
  modified_base 6: mod_base = OTHER; note = 2'-deoxy-2'-fluorouridine-3'-phosphate
  modified_base 7: mod_base = OTHER; note = 2'-O-methylcytidine-3'-phosphate
  modified_base 8: mod_base = OTHER; note = 2'-deoxy-2'-fluoroadenosine-3'-phosphate
  modified_base 9: mod_base = OTHER; note = 2'-deoxy-2'-fluoroguanosine-3'-phosphate
  modified_base 10: mod_base = OTHER; note = 2'-O-methylguanosine-3'-phosphate
  modified_base 11: mod_base = OTHER; note = 2'-O-methylguanosine-3'-phosphate
  modified_base 12: mod_base = OTHER; note = 2'-O-methyladenosine-3'-phosphate
  modified_base 13: mod_base = OTHER; note = 2'-O-methyladenosine-3'-phosphate
  modified_base 14: mod_base = OTHER; note = 2'-deoxy-2'-fluorocytidine-3'-phosphate
  modified_base 15: mod_base = OTHER; note = 2'-O-methyluridine-3'-phosphate
  modified_base 16: mod_base = OTHER; note = 2'-deoxy-2'-fluoroguanosine-3'-phosphate
  modified_base 17: mod_base = OTHER; note = 2'-O-methyladenosine-3'-phosphate
  modified_base 18: mod_base = OTHER; note = 2'-O-methyladenosine-3'-phosphate
  modified_base 19: mod_base = OTHER; note = 2'-O-methylguanosine-3'-phosphate
  modified_base 20: mod_base = OTHER; note = 2'-O-methylcytidine-3'-phosphate
  modified_base 21: mod_base = OTHER; note = 2'-O-methylcytidine-3'-phosphorothioate
  modified_base 22: mod_base = OTHER; note = 2'-O-methyladenosine-3'-phosphorothioate
  modified_base 23: mod_base = OTHER; note = 2'-O-methyluridine
atctttcagggaactgaagccat

SEQ ID NO: 552 - RNA, 23 nt, synthetic construct
  source 1..23: mol_type = other RNA
atggcttcagttccctgaaagac

SEQ ID NO: 553 - RNA, 21 nt, synthetic construct
  source 1..21: mol_type = other RNA
  modified_base 1: mod_base = OTHER; note = 2'-O-methyladenosine-3'-phosphorothioate
  modified_base 2: mod_base = OTHER; note = 2'-O-methyluridine-3'-phosphorothioate
  modified_base 3: mod_base = OTHER; note = 2'-O-methylcytidine-3'-phosphate
  modified_base 4: mod_base = OTHER; note = 2'-O-methylcytidine-3'-phosphate
  modified_base 5: mod_base = OTHER; note = 2'-O-methylcytidine-3'-phosphate
  modified_base 6: mod_base = OTHER; note = 2'-O-methyluridine-3'-phosphate
  modified_base 7: mod_base = OTHER; note = 2'-deoxy-2'-fluoroadenosine-3'-phosphate
  modified_base 8: mod_base = OTHER; note = 2'-O-methylguanosine-3'-phosphate
  modified_base 9: mod_base = OTHER; note = 2'-deoxy-2'-fluoroadenosine-3'-phosphate
  modified_base 10: mod_base = OTHER; note = 2'-deoxy-2'-fluoroguanosine-3'-phosphate
  modified_base 11: mod_base = OTHER; note = 2'-deoxy-2'-fluoroguanosine-3'-phosphate
  modified_base 12: mod_base = OTHER; note = 2'-O-methylcytidine-3'-phosphate
  modified_base 13: mod_base = OTHER; note = 2'-O-methyladenosine-3'-phosphate
  modified_base 14: mod_base = OTHER; note = 2'-O-methylguanosine-3'-phosphate
  modified_base 15: mod_base = OTHER; note = 2'-O-methylcytidine-3'-phosphate
  modified_base 16: mod_base = OTHER; note = 2'-O-methyluridine-3'-phosphate
  modified_base 17: mod_base = OTHER; note = 2'-O-methylguanosine-3'-phosphate
  modified_base 18: mod_base = OTHER; note = 2'-O-methylcytidine-3'-phosphate
  modified_base 19: mod_base = OTHER; note = 2'-O-methyluridine-3'-phosphate
  modified_base 20: mod_base = OTHER; note = 2'-O-methylcytidine-3'-phosphate
  modified_base 21: mod_base = OTHER; note = 2'-O-methyluridine-3'-phosphate ((2S,4R)-1-[29-[[2-(acetylamino)-2-deoxy-beta-D-galactopyra nosyl]oxy]-14,14-bis[[3-[[3-[[5-[[2-(acetylamino)-2-deoxy-b eta-D-galactopyranosyl]oxy]-1-oxopentyl]amino]propyl]amino] -3-oxopropoxy]methyl]-1,12,19,25-tetraoxo-16-oxa-13,20,24-t riazanonacos-1-yl]-4-hydroxy-2-pyrrolidinyl)methyl ester
atccctagaggcagctgctct

SEQ ID NO: 554 - RNA, 23 nt, synthetic construct
  source 1..23: mol_type = other RNA
  modified_base 1: mod_base = OTHER; note = 2'-O-methyladenosine-3'-phosphorothioate
  modified_base 2: mod_base = OTHER; note = 2'-deoxy-2'-fluoroguanosine-3'-phosphorothioate
  modified_base 3: mod_base = OTHER; note = 2'-O-methyladenosine-3'-phosphate
  modified_base 4: mod_base = OTHER; note = 2'-O-methylguanosine-3'-phosphate
  modified_base 5: mod_base = OTHER; note = 2'-O-methylcytidine-3'-phosphate
  modified_base 6: mod_base = OTHER; note = 2'-deoxy-2'-fluoroadenosine-3'-phosphate
  modified_base 7: mod_base = OTHER; note = 2'-O-methylguanosine-3'-phosphate
  modified_base 8: mod_base = OTHER; note = 2'-deoxy-2'-fluorocytidine-3'-phosphate
  modified_base 9: mod_base = OTHER; note = 2'-deoxy-2'-fluorouridine-3'-phosphate
  modified_base 10: mod_base = OTHER; note = 2'-O-methylguanosine-3'-phosphate
  modified_base 11: mod_base = OTHER; note = 2'-O-methylcytidine-3'-phosphate
  modified_base 12: mod_base = OTHER; note = 2'-O-methylcytidine-3'-phosphate
  modified_base 13: mod_base = OTHER; note = 2'-O-methyluridine-3'-phosphate
  modified_base 14: mod_base = OTHER; note = 2'-deoxy-2'-fluorocytidine-3'-phosphate
  modified_base 15: mod_base = OTHER; note = 2'-O-methyluridine-3'-phosphate
  modified_base 16: mod_base = OTHER; note = 2'-deoxy-2'-fluoroadenosine-3'-phosphate
  modified_base 17: mod_base = OTHER; note = 2'-O-methylguanosine-3'-phosphate
  modified_base 18: mod_base = OTHER; note = 2'-O-methylguanosine-3'-phosphate
  modified_base 19: mod_base = OTHER; note = 2'-O-methylguanosine-3'-phosphate
  modified_base 20: mod_base = OTHER; note = 2'-O-methyladenosine-3'-phosphate
  modified_base 21: mod_base = OTHER; note = 2'-O-methyluridine-3'-phosphorothioate
  modified_base 22: mod_base = OTHER; note = 2'-O-methylguanosine-3'-phosphorothioate
  modified_base 23: mod_base = OTHER; note = 2'-O-methyladenosine
agagcagctgcctctagggatga

SEQ ID NO: 555 - RNA, 23 nt, synthetic construct
  source 1..23: mol_type = other RNA
tcatccctagaggcagctgctcc

SEQ ID NO: 556 - RNA, 21 nt, synthetic construct
  source 1..21: mol_type = other RNA
  modified_base 1: mod_base = OTHER; note = 2'-O-methyluridine-3'-phosphorothioate
  modified_base 2: mod_base = OTHER; note = 2'-O-methylguanosine-3'-phosphorothioate
  modified_base 3: mod_base = OTHER; note = 2'-O-methyladenosine-3'-phosphate
  modified_base 4: mod_base = OTHER; note = 2'-O-methyladenosine-3'-phosphate
  modified_base 5: mod_base = OTHER; note = 2'-O-methyladenosine-3'-phosphate
  modified_base 6: mod_base = OTHER; note = 2'-O-methylguanosine-3'-phosphate
  modified_base 7: mod_base = OTHER; note = 2'-deoxy-2'-fluoroadenosine-3'-phosphate
  modified_base 8: mod_base = OTHER; note = 2'-O-methylcytidine-3'-phosphate
  modified_base 9: mod_base = OTHER; note = 2'-deoxy-2'-fluorouridine-3'-phosphate
  modified_base 10: mod_base = OTHER; note = 2'-deoxy-2'-fluoroadenosine-3'-phosphate
  modified_base 11: mod_base = OTHER; note = 2'-deoxy-2'-fluorocytidine-3'-phosphate
  modified_base 12: mod_base = OTHER; note = 2'-O-methyluridine-3'-phosphate
  modified_base 13: mod_base = OTHER; note = 2'-O-methylguanosine-3'-phosphate
  modified_base 14: mod_base = OTHER; note = 2'-O-methylguanosine-3'-phosphate
  modified_base 15: mod_base = OTHER; note = 2'-O-methyladenosine-3'-phosphate
  modified_base 16: mod_base = OTHER; note = 2'-O-methylguanosine-3'-phosphate
  modified_base 17: mod_base = OTHER; note = 2'-O-methylcytidine-3'-phosphate
  modified_base 18: mod_base = OTHER; note = 2'-O-methyladenosine-3'-phosphate
  modified_base 19: mod_base = OTHER; note = 2'-O-methylcytidine-3'-phosphate
  modified_base 20: mod_base = OTHER; note = 2'-O-methylcytidine-3'-phosphate
  modified_base 21: mod_base = OTHER; note = 2'-O-methyluridine-3'-phosphate ((2S,4R)-1-[29-[[2-(acetylamino)-2-deoxy-beta-D-galactopyra nosyl]oxy]-14,14-bis[[3-[[3-[[5-[[2-(acetylamino)-2-deoxy-b eta-D-galactopyranosyl]oxy]-1-oxopentyl]amino]propyl]amino] -3-oxopropoxy]methyl]-1,12,19,25-tetraoxo-16-oxa-13,20,24-t riazanonacos-1-yl]-4-hydroxy-2-pyrrolidinyl)methyl ester
tgaaagactactggagcacct

SEQ ID NO: 557 - RNA, 23 nt, synthetic construct
  source 1..23: mol_type = other RNA
  modified_base 1: mod_base = OTHER; note = 2'-O-methyladenosine-3'-phosphorothioate
  modified_base 2: mod_base = OTHER; note = 2'-deoxy-2'-fluoroguanosine-3'-phosphorothioate
  modified_base 3: mod_base = OTHER; note = 2'-O-methylguanosine-3'-phosphate
  modified_base 4: mod_base = OTHER; note = 2'-O-methyluridine-3'-phosphate
  modified_base 5: mod_base = OTHER; note = 2'-O-methylguanosine-3'-phosphate
  modified_base 6: mod_base = OTHER; note = 2'-deoxy-2'-fluorocytidine-3'-phosphate
  modified_base 7: mod_base = OTHER; note = 2'-O-methyluridine-3'-phosphate
  modified_base 8: mod_base = OTHER; note = 2'-deoxy-2'-fluorocytidine-3'-phosphate
  modified_base 9: mod_base = OTHER; note = 2'-deoxy-2'-fluorocytidine-3'-phosphate
  modified_base 10: mod_base = OTHER; note = 2'-O-methyladenosine-3'-phosphate
  modified_base 11: mod_base = OTHER; note = 2'-O-methylguanosine-3'-phosphate
  modified_base 12: mod_base = OTHER; note = 2'-O-methyluridine-3'-phosphate
  modified_base 13: mod_base = OTHER; note = 2'-O-methyladenosine-3'-phosphate
  modified_base 14: mod_base = OTHER; note = 2'-deoxy-2'-fluoroguanosine-3'-phosphate
  modified_base 15: mod_base = OTHER; note = 2'-O-methyluridine-3'-phosphate
  modified_base 16: mod_base = OTHER; note = 2'-deoxy-2'-fluorocytidine-3'-phosphate
  modified_base 17: mod_base = OTHER; note = 2'-O-methyluridine-3'-phosphate
  modified_base 18: mod_base = OTHER; note = 2'-O-methyluridine-3'-phosphate
  modified_base 19: mod_base = OTHER; note = 2'-O-methyluridine-3'-phosphate
  modified_base 20: mod_base = OTHER; note = 2'-O-methylcytidine-3'-phosphate
  modified_base 21: mod_base = OTHER; note = 2'-O-methyladenosine-3'-phosphorothioate
  modified_base 22: mod_base = OTHER; note = 2'-O-methylguanosine-3'-phosphorothioate
  modified_base 23: mod_base = OTHER; note = 2'-O-methylguanosine
aggtgctccagtagtctttcagg

SEQ ID NO: 558 - RNA, 23 nt, synthetic construct
  source 1..23: mol_type = other RNA
cctgaaagactactggagcaccg

SEQ ID NO: 559 - RNA, 21 nt, synthetic construct
  source 1..21: mol_type = other RNA
  modified_base 1: mod_base = OTHER; note = 2'-O-methyladenosine-3'-phosphorothioate
  modified_base 2: mod_base = OTHER; note = 2'-O-methyladenosine-3'-phosphorothioate
  modified_base 3: mod_base = OTHER; note = 2'-O-methylguanosine-3'-phosphate
  modified_base 4: mod_base = OTHER; note = 2'-O-methyladenosine-3'-phosphate
  modified_base 5: mod_base = OTHER; note = 2'-O-methylcytidine-3'-phosphate
  modified_base 6: mod_base = OTHER; note = 2'-O-methylcytidine-3'-phosphate
  modified_base 7: mod_base = OTHER; note = 2'-deoxy-2'-fluoroguanosine-3'-phosphate
  modified_base 8: mod_base = OTHER; note = 2'-O-methylcytidine-3'-phosphate
  modified_base 9: mod_base = OTHER; note = 2'-deoxy-2'-fluorocytidine-3'-phosphate
  modified_base 10: mod_base = OTHER; note = 2'-deoxy-2'-fluoroadenosine-3'-phosphate
  modified_base 11: mod_base = OTHER; note = 2'-deoxy-2'-fluoroadenosine-3'-phosphate
  modified_base 12: mod_base = OTHER; note = 2'-O-methylguanosine-3'-phosphate
  modified_base 13: mod_base = OTHER; note = 2'-O-methylguanosine-3'-phosphate
  modified_base 14: mod_base = OTHER; note = 2'-O-methyladenosine-3'-phosphate
  modified_base 15: mod_base = OTHER; note = 2'-O-methyluridine-3'-phosphate
  modified_base 16: mod_base = OTHER; note = 2'-O-methylguanosine-3'-phosphate
  modified_base 17: mod_base = OTHER; note = 2'-O-methylcytidine-3'-phosphate
  modified_base 18: mod_base = OTHER; note = 2'-O-methyladenosine-3'-phosphate
  modified_base 19: mod_base = OTHER; note = 2'-O-methylcytidine-3'-phosphate
  modified_base 20: mod_base = OTHER; note = 2'-O-methyluridine-3'-phosphate
  modified_base 21: mod_base = OTHER; note = 2'-O-methyluridine-3'-phosphate ((2S,4R)-1-[29-[[2-(acetylamino)-2-deoxy-beta-D-galactopyra nosyl]oxy]-14,14-bis[[3-[[3-[[5-[[2-(acetylamino)-2-deoxy-b eta-D-galactopyranosyl]oxy]-1-oxopentyl]amino]propyl]amino] -3-oxopropoxy]methyl]-1,12,19,25-tetraoxo-16-oxa-13,20,24-t riazanonacos-1-yl]-4-hydroxy-2-pyrrolidinyl)methyl ester
aagaccgccaaggatgcactt

SEQ ID NO: 560 - RNA, 23 nt, synthetic construct
  source 1..23: mol_type = other RNA
  modified_base 1: mod_base = OTHER; note = 2'-O-methyladenosine-3'-phosphorothioate
  modified_base 2: mod_base = OTHER; note = 2'-deoxy-2'-fluoroadenosine-3'-phosphorothioate
  modified_base 3: mod_base = OTHER; note = 2'-O-methylguanosine-3'-phosphate
  modified_base 4: mod_base = OTHER; note = 2'-O-methyluridine-3'-phosphate
  modified_base 5: mod_base = OTHER; note = 2'-O-methylguanosine-3'-phosphate
  modified_base 6: mod_base = OTHER; note = 2'-deoxy-2'-fluorocytidine-3'-phosphate
  modified_base 7: mod_base = OTHER; note = 2'-O-methyladenosine-3'-phosphate
  modified_base 8: mod_base = OTHER; note = 2'-deoxy-2'-fluorouridine-3'-phosphate
  modified_base 9: mod_base = OTHER; note = 2'-deoxy-2'-fluorocytidine-3'-phosphate
  modified_base 10: mod_base = OTHER; note = 2'-O-methylcytidine-3'-phosphate
  modified_base 11: mod_base = OTHER; note = 2'-O-methyluridine-3'-phosphate
  modified_base 12: mod_base = OTHER; note = 2'-O-methyluridine-3'-phosphate
  modified_base 13: mod_base = OTHER; note = 2'-O-methylguanosine-3'-phosphate
  modified_base 14: mod_base = OTHER; note = 2'-deoxy-2'-fluoroguanosine-3'-phosphate
  modified_base 15: mod_base = OTHER; note = 2'-O-methylcytidine-3'-phosphate
  modified_base 16: mod_base = OTHER; note = 2'-deoxy-2'-fluoroguanosine-3'-phosphate
  modified_base 17: mod_base = OTHER; note = 2'-O-methylguanosine-3'-phosphate
  modified_base 18: mod_base = OTHER; note = 2'-O-methyluridine-3'-phosphate
  modified_base 19: mod_base = OTHER; note = 2'-O-methylcytidine-3'-phosphate
  modified_base 20: mod_base = OTHER; note = 2'-O-methyluridine-3'-phosphate
  modified_base 21: mod_base = OTHER; note = 2'-O-methyluridine-3'-phosphorothioate
  modified_base 22: mod_base = OTHER; note = 2'-O-methylguanosine-3'-phosphorothioate
  modified_base 23: mod_base = OTHER; note = 2'-O-methylguanosine
aagtgcatccttggcggtcttgg

SEQ ID NO: 561 - RNA, 23 nt, synthetic construct
  source 1..23: mol_type = other RNA
ccaagaccgccaaggatgcactg

SEQ ID NO: 562 - RNA, 21 nt, synthetic construct
  source 1..21: mol_type = other RNA
  modified_base 1: mod_base = OTHER; note = 2'-O-methylguanosine-3'-phosphorothioate
  modified_base 2: mod_base = OTHER; note = 2'-O-methylcytidine-3'-phosphorothioate
  modified_base 3: mod_base = OTHER; note = 2'-O-methyluridine-3'-phosphate
  modified_base 4: mod_base = OTHER; note = 2'-O-methylguanosine-3'-phosphate
  modified_base 5: mod_base = OTHER; note = 2'-O-methylcytidine-3'-phosphate
  modified_base 6: mod_base = OTHER; note = 2'-O-methylcytidine-3'-phosphate
  modified_base 7: mod_base = OTHER; note = 2'-deoxy-2'-fluorouridine-3'-phosphate
  modified_base 8: mod_base = OTHER; note = 2'-O-methylguanosine-3'-phosphate
  modified_base 9: mod_base = OTHER; note = 2'-deoxy-2'-fluoroadenosine-3'-phosphate
  modified_base 10: mod_base = OTHER; note = 2'-deoxy-2'-fluoroguanosine-3'-phosphate
  modified_base 11: mod_base = OTHER; note = 2'-deoxy-2'-fluoroadenosine-3'-phosphate
  modified_base 12: mod_base = OTHER; note = 2'-O-methylcytidine-3'-phosphate
  modified_base 13: mod_base = OTHER; note = 2'-O-methylcytidine-3'-phosphate
  modified_base 14: mod_base = OTHER; note = 2'-O-methyluridine-3'-phosphate
  modified_base 15: mod_base = OTHER; note = 2'-O-methylcytidine-3'-phosphate
  modified_base 16: mod_base = OTHER; note = 2'-O-methyladenosine-3'-phosphate
  modified_base 17: mod_base = OTHER; note = 2'-O-methyladenosine-3'-phosphate
  modified_base 18: mod_base = OTHER; note = 2'-O-methyluridine-3'-phosphate
  modified_base 19: mod_base = OTHER; note = 2'-O-methyladenosine-3'-phosphate
  modified_base 20: mod_base = OTHER; note = 2'-O-methylcytidine-3'-phosphate
  modified_base 21: mod_base = OTHER; note = 2'-O-methyluridine-3'-phosphate ((2S,4R)-1-[29-[[2-(acetylamino)-2-deoxy-beta-D-galactopyra nosyl]oxy]-14,14-bis[[3-[[3-[[5-[[2-(acetylamino)-2-deoxy-b eta-D-galactopyranosyl]oxy]-1-oxopentyl]amino]propyl]amino] -3-oxopropoxy]methyl]-1,12,19,25-tetraoxo-16-oxa-13,20,24-t riazanonacos-1-yl]-4-hydroxy-2-pyrrolidinyl)methyl ester
gctgcctgagacctcaatact

SEQ ID NO: 563 - RNA, 23 nt, synthetic construct
  source 1..23: mol_type = other RNA
  modified_base 1: mod_base = OTHER; note = 2'-O-methyladenosine-3'-phosphorothioate
  modified_base 2: mod_base = OTHER; note = 2'-deoxy-2'-fluoroguanosine-3'-phosphorothioate
  modified_base 3: mod_base = OTHER; note = 2'-O-methyluridine-3'-phosphate
  modified_base 4: mod_base = OTHER; note = 2'-O-methyladenosine-3'-phosphate
  modified_base 5: mod_base = OTHER; note = 2'-O-methyluridine-3'-phosphate
  modified_base 6: mod_base = OTHER; note = 2'-deoxy-2'-fluorouridine-3'-phosphate
  modified_base 7: mod_base = OTHER; note = 2'-O-methylguanosine-3'-phosphate
  modified_base 8: mod_base = OTHER; note = 2'-deoxy-2'-fluoroadenosine-3'-phosphate
  modified_base 9: mod_base = OTHER; note = 2'-deoxy-2'-fluoroguanosine-3'-phosphate
  modified_base 10: mod_base = OTHER; note = 2'-O-methylguanosine-3'-phosphate
  modified_base 11: mod_base = OTHER; note = 2'-O-methyluridine-3'-phosphate
  modified_base 12: mod_base = OTHER; note = 2'-O-methylcytidine-3'-phosphate
  modified_base 13: mod_base = OTHER; note = 2'-O-methyluridine-3'-phosphate
  modified_base 14: mod_base = OTHER; note = 2'-deoxy-2'-fluorocytidine-3'-phosphate
  modified_base 15: mod_base = OTHER; note = 2'-O-methyladenosine-3'-phosphate
  modified_base 16: mod_base = OTHER; note = 2'-deoxy-2'-fluoroguanosine-3'-phosphate
  modified_base 17: mod_base = OTHER; note = 2'-O-methylguanosine-3'-phosphate
  modified_base 18: mod_base = OTHER; note = 2'-O-methylcytidine-3'-phosphate
  modified_base 19: mod_base = OTHER; note = 2'-O-methyladenosine-3'-phosphate
  modified_base 20: mod_base = OTHER; note = 2'-O-methylguanosine-3'-phosphate
  modified_base 21: mod_base = OTHER; note = 2'-O-methylcytidine-3'-phosphorothioate
  modified_base 22: mod_base = OTHER; note = 2'-O-methylcytidine-3'-phosphorothioate
  modified_base 23: mod_base = OTHER; note = 2'-O-methyladenosine
agtattgaggtctcaggcagcca

SEQ ID NO: 564 - RNA, 23 nt, synthetic construct
  source 1..23: mol_type = other RNA
tggctgcctgagacctcaatacc

SEQ ID NO: 565 - RNA, 21 nt, synthetic construct
  source 1..21: mol_type = other RNA
  modified_base 1: mod_base = OTHER; note = 2'-O-methylguanosine-3'-phosphorothioate
  modified_base 2: mod_base = OTHER; note = 2'-O-methylguanosine-3'-phosphorothioate
  modified_base 3: mod_base = OTHER; note = 2'-O-methylcytidine-3'-phosphate
  modified_base 4: mod_base = OTHER; note = 2'-O-methylcytidine-3'-phosphate
  modified_base 5: mod_base = OTHER; note = 2'-O-methyluridine-3'-phosphate
  modified_base 6: mod_base = OTHER; note = 2'-O-methylcytidine-3'-phosphate
  modified_base 7: mod_base = OTHER; note = 2'-deoxy-2'-fluorocytidine-3'-phosphate
  modified_base 8: mod_base = OTHER; note = 2'-O-methylcytidine-3'-phosphate
  modified_base 9: mod_base = OTHER; note = 2'-deoxy-2'-fluoroadenosine-3'-phosphate
  modified_base 10: mod_base = OTHER; note = 2'-deoxy-2'-fluoroadenosine-3'-phosphate
  modified_base 11: mod_base = OTHER; note = 2'-deoxy-2'-fluorouridine-3'-phosphate
  modified_base 12: mod_base = OTHER; note = 2'-O-methyladenosine-3'-phosphate
  modified_base 13: mod_base = OTHER; note = 2'-O-methyladenosine-3'-phosphate
  modified_base 14: mod_base = OTHER; note = 2'-O-methyladenosine-3'-phosphate
  modified_base 15: mod_base = OTHER; note = 2'-O-methylguanosine-3'-phosphate
  modified_base 16: mod_base = OTHER; note = 2'-O-methylcytidine-3'-phosphate
  modified_base 17: mod_base = OTHER; note = 2'-O-methyluridine-3'-phosphate
  modified_base 18: mod_base = OTHER; note = 2'-O-methylguanosine-3'-phosphate
  modified_base 19: mod_base = OTHER; note = 2'-O-methylguanosine-3'-phosphate
  modified_base 20: mod_base = OTHER; note = 2'-O-methyladenosine-3'-phosphate
  modified_base 21: mod_base = OTHER; note = 2'-O-methyluridine-3'-phosphate ((2S,4R)-1-[29-[[2-(acetylamino)-2-deoxy-beta-D-galactopyra nosyl]oxy]-14,14-bis[[3-[[3-[[5-[[2-(acetylamino)-2-deoxy-b eta-D-galactopyranosyl]oxy]-1-oxopentyl]amino]propyl]amino] -3-oxopropoxy]methyl]-1,12,19,25-tetraoxo-16-oxa-13,20,24-t riazanonacos-1-yl]-4-hydroxy-2-pyrrolidinyl)methyl ester
ggcctcccaataaagctggat

SEQ ID NO: 566 - RNA, 23 nt, synthetic construct
  source 1..23: mol_type = other RNA
  modified_base 1: mod_base = OTHER; note = 2'-O-methyladenosine-3'-phosphorothioate
  modified_base 2: mod_base = OTHER; note = 2'-deoxy-2'-fluorouridine-3'-phosphorothioate
  modified_base 3: mod_base = OTHER; note = 2'-O-methylcytidine-3'-phosphate
  modified_base 4: mod_base = OTHER; note = 2'-O-methylcytidine-3'-phosphate
  modified_base 5: mod_base = OTHER; note = 2'-O-methyladenosine-3'-phosphate
  modified_base 6: mod_base = OTHER; note = 2'-deoxy-2'-fluoroguanosine-3'-phosphate
  modified_base 7: mod_base = OTHER; note = 2'-O-methylcytidine-3'-phosphate
  modified_base 8: mod_base = OTHER; note = 2'-deoxy-2'-fluorouridine-3'-phosphate
  modified_base 9: mod_base = OTHER; note = 2'-deoxy-2'-fluorouridine-3'-phosphate
  modified_base 10: mod_base = OTHER; note = 2'-O-methyluridine-3'-phosphate
  modified_base 11: mod_base = OTHER; note = 2'-O-methyladenosine-3'-phosphate
  modified_base 12: mod_base = OTHER; note = 2'-O-methyluridine-3'-phosphate
  modified_base 13: mod_base = OTHER; note = 2'-O-methyluridine-3'-phosphate
  modified_base 14: mod_base = OTHER; note = 2'-deoxy-2'-fluoroguanosine-3'-phosphate
  modified_base 15: mod_base = OTHER; note = 2'-O-methylguanosine-3'-phosphate
  modified_base 16: mod_base = OTHER; note = 2'-deoxy-2'-fluoroguanosine-3'-phosphate
  modified_base 17: mod_base = OTHER; note = 2'-O-methyladenosine-3'-phosphate
  modified_base 18: mod_base = OTHER; note = 2'-O-methylguanosine-3'-phosphate
  modified_base 19: mod_base = OTHER; note = 2'-O-methylguanosine-3'-phosphate
  modified_base 20: mod_base = OTHER; note = 2'-O-methylcytidine-3'-phosphate
  modified_base 21: mod_base = OTHER; note = 2'-O-methylcytidine-3'-phosphorothioate
  modified_base 22: mod_base = OTHER; note = 2'-O-methyladenosine-3'-phosphorothioate
  modified_base 23: mod_base = OTHER; note = 2'-O-methylguanosine
atccagctttattgggaggccag

SEQ ID NO: 567 - RNA, 23 nt, synthetic construct
  source 1..23: mol_type = other RNA
ctggcctcccaataaagctggac

SEQ ID NO: 568 - RNA, 21 nt, synthetic construct
  source 1..21: mol_type = other RNA
  modified_base 1: mod_base = OTHER; note = 2'-O-methylcytidine-3'-phosphorothioate
  modified_base 2: mod_base = OTHER; note = 2'-O-methyladenosine-3'-phosphorothioate
  modified_base 3: mod_base = OTHER; note = 2'-O-methylguanosine-3'-phosphate
  modified_base 4: mod_base = OTHER; note = 2'-O-methyluridine-3'-phosphate
  modified_base 5: mod_base = OTHER; note = 2'-O-methyluridine-3'-phosphate
  modified_base 6: mod_base = OTHER; note = 2'-O-methylcytidine-3'-phosphate
  modified_base 7: mod_base = OTHER; note = 2'-deoxy-2'-fluoroadenosine-3'-phosphate
  modified_base 8: mod_base = OTHER; note = 2'-O-methyluridine-3'-phosphate
  modified_base 9: mod_base = OTHER; note = 2'-deoxy-2'-fluorocytidine-3'-phosphate
  modified_base 10: mod_base = OTHER; note = 2'-deoxy-2'-fluorocytidine-3'-phosphate
  modified_base 11: mod_base = OTHER; note = 2'-deoxy-2'-fluorocytidine-3'-phosphate
  modified_base 12: mod_base = OTHER; note = 2'-O-methyluridine-3'-phosphate
  modified_base 13: mod_base = OTHER; note = 2'-O-methyladenosine-3'-phosphate
  modified_base 14: mod_base = OTHER; note = 2'-O-methylguanosine-3'-phosphate
  modified_base 15: mod_base = OTHER; note = 2'-O-methyladenosine-3'-phosphate
  modified_base 16: mod_base = OTHER; note = 2'-O-methylguanosine-3'-phosphate
  modified_base 17: mod_base = OTHER; note = 2'-O-methylguanosine-3'-phosphate
  modified_base 18: mod_base = OTHER; note = 2'-O-methylcytidine-3'-phosphate
  modified_base 19: mod_base = OTHER; note = 2'-O-methyladenosine-3'-phosphate
  modified_base 20: mod_base = OTHER; note = 2'-O-methylguanosine-3'-phosphate
  modified_base 21: mod_base = OTHER; note = 2'-O-methyluridine-3'-phosphate ((2S,4R)-1-[29-[[2-(acetylamino)-2-deoxy-beta-D-galactopyra nosyl]oxy]-14,14-bis[[3-[[3-[[5-[[2-(acetylamino)-2-deoxy-b eta-D-galactopyranosyl]oxy]-1-oxopentyl]amino]propyl]amino] -3-oxopropoxy]methyl]-1,12,19,25-tetraoxo-16-oxa-13,20,24-t riazanonacos-1-yl]-4-hydroxy-2-pyrrolidinyl)methyl ester
cagttcatccctagaggcagt

SEQ ID NO: 569 - RNA, 23 nt, synthetic construct
  source 1..23: mol_type = other RNA
  modified_base 1: mod_base = OTHER; note = 2'-O-methyladenosine-3'-phosphorothioate
  modified_base 2: mod_base = OTHER; note = 2'-deoxy-2'-fluorocytidine-3'-phosphorothioate
  modified_base 3: mod_base = OTHER; note = 2'-O-methyluridine-3'-phosphate
  modified_base 4: mod_base = OTHER; note = 2'-O-methylguanosine-3'-phosphate
  modified_base 5: mod_base = OTHER; note = 2'-O-methylcytidine-3'-phosphate
  modified_base 6: mod_base = OTHER; note = 2'-deoxy-2'-fluorocytidine-3'-phosphate
  modified_base 7: mod_base = OTHER; note = 2'-O-methyluridine-3'-phosphate
  modified_base 8: mod_base = OTHER; note = 2'-deoxy-2'-fluorocytidine-3'-phosphate
  modified_base 9: mod_base = OTHER; note = 2'-deoxy-2'-fluorouridine-3'-phosphate
  modified_base 10: mod_base = OTHER; note = 2'-O-methyladenosine-3'-phosphate
  modified_base 11: mod_base = OTHER; note = 2'-O-methylguanosine-3'-phosphate
  modified_base 12: mod_base = OTHER; note = 2'-O-methylguanosine-3'-phosphate
  modified_base 13: mod_base = OTHER; note = 2'-O-methylguanosine-3'-phosphate
  modified_base 14: mod_base = OTHER; note = 2'-deoxy-2'-fluoroadenosine-3'-phosphate
  modified_base 15: mod_base = OTHER; note = 2'-O-methyluridine-3'-phosphate
  modified_base 16: mod_base = OTHER; note = 2'-deoxy-2'-fluoroguanosine-3'-phosphate
  modified_base 17: mod_base = OTHER; note = 2'-O-methyladenosine-3'-phosphate
  modified_base 18: mod_base = OTHER; note = 2'-O-methyladenosine-3'-phosphate
  modified_base 19: mod_base = OTHER; note = 2'-O-methylcytidine-3'-phosphate
  modified_base 20: mod_base = OTHER; note = 2'-O-methyluridine-3'-phosphate
  modified_base 21: mod_base = OTHER; note = 2'-O-methylguanosine-3'-phosphorothioate
  modified_base 22: mod_base = OTHER; note = 2'-O-methyladenosine-3'-phosphorothioate
  modified_base 23: mod_base = OTHER; note = 2'-O-methylguanosine
actgcctctagggatgaactgag

SEQ ID NO: 570 - RNA, 23 nt, synthetic construct
  source 1..23: mol_type = other RNA
ctcagttcatccctagaggcagc

SEQ ID NO: 571 - RNA, 21 nt, synthetic construct
  source 1..21: mol_type = other RNA
  modified_base 1: mod_base = OTHER; note = 2'-O-methylguanosine-3'-phosphorothioate
  modified_base 2: mod_base = OTHER; note = 2'-O-methylguanosine-3'-phosphorothioate
  modified_base 3: mod_base = OTHER; note = 2'-O-methylcytidine-3'-phosphate
  modified_base 4: mod_base = OTHER; note = 2'-O-methyluridine-3'-phosphate
  modified_base 5: mod_base = OTHER; note = 2'-O-methylguanosine-3'-phosphate
  modified_base 6: mod_base = OTHER; note = 2'-O-methylcytidine-3'-phosphate
  modified_base 7: mod_base = OTHER; note = 2'-deoxy-2'-fluorocytidine-3'-phosphate
  modified_base 8: mod_base = OTHER; note = 2'-O-methyluridine-3'-phosphate
  modified_base 9: mod_base = OTHER; note = 2'-deoxy-2'-fluoroguanosine-3'-phosphate
  modified_base 10: mod_base = OTHER; note = 2'-deoxy-2'-fluoroadenosine-3'-phosphate
  modified_base 11: mod_base = OTHER; note = 2'-deoxy-2'-fluoroguanosine-3'-phosphate
  modified_base 12: mod_base = OTHER; note = 2'-O-methyladenosine-3'-phosphate
  modified_base 13: mod_base = OTHER; note = 2'-O-methylcytidine-3'-phosphate
  modified_base 14: mod_base = OTHER; note = 2'-O-methylcytidine-3'-phosphate
  modified_base 15: mod_base = OTHER; note = 2'-O-methyluridine-3'-phosphate
  modified_base 16: mod_base = OTHER; note = 2'-O-methylcytidine-3'-phosphate
  modified_base 17: mod_base = OTHER; note = 2'-O-methyladenosine-3'-phosphate
  modified_base 18: mod_base = OTHER; note = 2'-O-methyladenosine-3'-phosphate
  modified_base 19: mod_base = OTHER; note = 2'-O-methyluridine-3'-phosphate
  modified_base 20: mod_base = OTHER; note = 2'-O-methyladenosine-3'-phosphate
  modified_base 21: mod_base = OTHER; note = 2'-O-methyluridine-3'-phosphate ((2S,4R)-1-[29-[[2-(acetylamino)-2-deoxy-beta-D-galactopyra nosyl]oxy]-14,14-bis[[3-[[3-[[5-[[2-(acetylamino)-2-deoxy-b eta-D-galactopyranosyl]oxy]-1-oxopentyl]amino]propyl]amino] -3-oxopropoxy]methyl]-1,12,19,25-tetraoxo-16-oxa-13,20,24-t riazanonacos-1-yl]-4-hydroxy-2-pyrrolidinyl)methyl ester
ggctgcctgagacctcaatat

SEQ ID NO: 572 - RNA, 23 nt, synthetic construct
  source 1..23: mol_type = other RNA
  modified_base 1: mod_base = OTHER; note = 2'-O-methyladenosine-3'-phosphorothioate
  modified_base 2: mod_base = OTHER; note = 2'-deoxy-2'-fluorouridine-3'-phosphorothioate
  modified_base 3: mod_base = OTHER; note = 2'-O-methyladenosine-3'-phosphate
  modified_base 4: mod_base = OTHER; note = 2'-O-methyluridine-3'-phosphate
  modified_base 5: mod_base = OTHER; note = 2'-O-methyluridine-3'-phosphate
  modified_base 6: mod_base = OTHER; note = 2'-deoxy-2'-fluoroguanosine-3'-phosphate
  modified_base 7: mod_base = OTHER; note = 2'-O-methyladenosine-3'-phosphate
  modified_base 8: mod_base = OTHER; note = 2'-deoxy-2'-fluoroguanosine-3'-phosphate
  modified_base 9: mod_base = OTHER; note = 2'-deoxy-2'-fluoroguanosine-3'-phosphate
  modified_base 10: mod_base = OTHER; note = 2'-O-methyluridine-3'-phosphate
  modified_base 11: mod_base = OTHER; note = 2'-O-methylcytidine-3'-phosphate
  modified_base 12: mod_base = OTHER; note = 2'-O-methyluridine-3'-phosphate
  modified_base 13: mod_base = OTHER; note = 2'-O-methylcytidine-3'-phosphate
  modified_base 14: mod_base = OTHER; note = 2'-deoxy-2'-fluoroadenosine-3'-phosphate
  modified_base 15: mod_base = OTHER; note = 2'-O-methylguanosine-3'-phosphate
  modified_base 16: mod_base = OTHER; note = 2'-deoxy-2'-fluoroguanosine-3'-phosphate
  modified_base 17: mod_base = OTHER; note = 2'-O-methylcytidine-3'-phosphate
  modified_base 18: mod_base = OTHER; note = 2'-O-methyladenosine-3'-phosphate
  modified_base 19: mod_base = OTHER; note = 2'-O-methylguanosine-3'-phosphate
  modified_base 20: mod_base = OTHER; note = 2'-O-methylcytidine-3'-phosphate
  modified_base 21: mod_base = OTHER; note = 2'-O-methylcytidine-3'-phosphorothioate
  modified_base 22: mod_base = OTHER; note = 2'-O-methyladenosine-3'-phosphorothioate
  modified_base 23: mod_base = OTHER; note = 2'-O-methylcytidine
atattgaggtctcaggcagccac

SEQ ID NO: 573 - RNA, 23 nt, synthetic construct
  source 1..23: mol_type = other RNA
gtggctgcctgagacctcaatac

SEQ ID NO: 574 - RNA, 21 nt, synthetic construct
  source 1..21: mol_type = other RNA
  modified_base 1: mod_base = OTHER; note = 2'-O-methylguanosine-3'-phosphorothioate
  modified_base 2: mod_base = OTHER; note = 2'-O-methyladenosine-3'-phosphorothioate
  modified_base 3: mod_base = OTHER; note = 2'-O-methyladenosine-3'-phosphate
  modified_base 4: mod_base = OTHER; note = 2'-O-methyladenosine-3'-phosphate
  modified_base 5: mod_base = OTHER; note = 2'-O-methylguanosine-3'-phosphate
  modified_base 6: mod_base = OTHER; note = 2'-O-methyladenosine-3'-phosphate
  modified_base 7: mod_base = OTHER; note = 2'-deoxy-2'-fluorocytidine-3'-phosphate
  modified_base 8: mod_base = OTHER; note = 2'-O-methyluridine-3'-phosphate
  modified_base 9: mod_base = OTHER; note = 2'-deoxy-2'-fluoroadenosine-3'-phosphate
  modified_base 10: mod_base = OTHER; note = 2'-deoxy-2'-fluorocytidine-3'-phosphate
  modified_base 11: mod_base = OTHER; note = 2'-deoxy-2'-fluorouridine-3'-phosphate
  modified_base 12: mod_base = OTHER; note = 2'-O-methylguanosine-3'-phosphate
  modified_base 13: mod_base = OTHER; note = 2'-O-methylguanosine-3'-phosphate
  modified_base 14: mod_base = OTHER; note = 2'-O-methyladenosine-3'-phosphate
  modified_base 15: mod_base = OTHER; note = 2'-O-methylguanosine-3'-phosphate
  modified_base 16: mod_base = OTHER; note = 2'-O-methylcytidine-3'-phosphate
  modified_base 17: mod_base = OTHER; note = 2'-O-methyladenosine-3'-phosphate
  modified_base 18: mod_base = OTHER; note = 2'-O-methylcytidine-3'-phosphate
  modified_base 19: mod_base = OTHER; note = 2'-O-methylcytidine-3'-phosphate
  modified_base 20: mod_base = OTHER; note = 2'-O-methylguanosine-3'-phosphate
  modified_base 21: mod_base = OTHER; note = 2'-O-methyluridine-3'-phosphate ((2S,4R)-1-[29-[[2-(acetylamino)-2-deoxy-beta-D-galactopyra nosyl]oxy]-14,14-bis[[3-[[3-[[5-[[2-(acetylamino)-2-deoxy-b eta-D-galactopyranosyl]oxy]-1-oxopentyl]amino]propyl]amino] -3-oxopropoxy]methyl]-1,12,19,25-tetraoxo-16-oxa-13,20,24-t riazanonacos-1-yl]-4-hydroxy-2-pyrrolidinyl)methyl ester
gaaagactactggagcaccgt

SEQ ID NO: 575 - RNA, 23 nt, synthetic construct
  source 1..23: mol_type = other RNA
  modified_base 1: mod_base = OTHER; note = 2'-O-methyladenosine-3'-phosphorothioate
  modified_base 2: mod_base = OTHER; note = 2'-deoxy-2'-fluorocytidine-3'-phosphorothioate
  modified_base 3: mod_base = OTHER; note = 2'-O-methylguanosine-3'-phosphate
  modified_base 4: mod_base = OTHER; note = 2'-O-methylguanosine-3'-phosphate
  modified_base 5: mod_base = OTHER; note = 2'-O-methyluridine-3'-phosphate
  modified_base 6: mod_base = OTHER; note = 2'-deoxy-2'-fluoroguanosine-3'-phosphate
  modified_base 7: mod_base = OTHER; note = 2'-O-methylcytidine-3'-phosphate
  modified_base 8: mod_base = OTHER; note = 2'-deoxy-2'-fluorouridine-3'-phosphate
  modified_base 9: mod_base = OTHER; note = 2'-deoxy-2'-fluorocytidine-3'-phosphate
  modified_base 10: mod_base = OTHER; note = 2'-O-methylcytidine-3'-phosphate
  modified_base 11: mod_base = OTHER; note = 2'-O-methyladenosine-3'-phosphate
  modified_base 12: mod_base = OTHER; note = 2'-O-methylguanosine-3'-phosphate
  modified_base 13: mod_base = OTHER; note = 2'-O-methyluridine-3'-phosphate
  modified_base 14: mod_base = OTHER; note = 2'-deoxy-2'-fluoroadenosine-3'-phosphate
  modified_base 15: mod_base = OTHER; note = 2'-O-methylguanosine-3'-phosphate
  modified_base 16: mod_base = OTHER; note = 2'-deoxy-2'-fluorouridine-3'-phosphate
  modified_base 17: mod_base = OTHER; note = 2'-O-methylcytidine-3'-phosphate
  modified_base 18: mod_base = OTHER; note = 2'-O-methyluridine-3'-phosphate
  modified_base 19: mod_base = OTHER; note = 2'-O-methyluridine-3'-phosphate
  modified_base 20: mod_base = OTHER; note = 2'-O-methyluridine-3'-phosphate
  modified_base 21: mod_base = OTHER; note = 2'-O-methylcytidine-3'-phosphorothioate
  modified_base 22: mod_base = OTHER; note = 2'-O-methyladenosine-3'-phosphorothioate
  modified_base 23: mod_base = OTHER; note = 2'-O-methylguanosine
acggtgctccagtagtctttcag

SEQ ID NO: 576 - RNA, 23 nt, synthetic construct
  source 1..23: mol_type = other RNA
ctgaaagactactggagcaccgt

SEQ ID NO: 577 - RNA, 21 nt, synthetic construct
  source 1..21: mol_type = other RNA
  modified_base 1: mod_base = OTHER; note = 2'-O-methylguanosine-3'-phosphorothioate
  modified_base 2: mod_base = OTHER; note = 2'-O-methyladenosine-3'-phosphorothioate
  modified_base 3: mod_base = OTHER; note = 2'-O-methylguanosine-3'-phosphate
  modified_base 4: mod_base = OTHER; note = 2'-O-methylguanosine-3'-phosphate
  modified_base 5: mod_base = OTHER; note = 2'-O-methylcytidine-3'-phosphate
  modified_base 6: mod_base = OTHER; note = 2'-O-methyladenosine-3'-phosphate
  modified_base 7: mod_base = OTHER; note = 2'-deoxy-2'-fluoroguanosine-3'-phosphate
  modified_base 8: mod_base = OTHER; note = 2'-O-methylcytidine-3'-phosphate
  modified_base 9: mod_base = OTHER; note = 2'-deoxy-2'-fluorouridine-3'-phosphate
  modified_base 10: mod_base = OTHER; note = 2'-deoxy-2'-fluoroguanosine-3'-phosphate
  modified_base 11: mod_base = OTHER; note = 2'-deoxy-2'-fluorocytidine-3'-phosphate
  modified_base 12: mod_base = OTHER; note = 2'-O-methyluridine-3'-phosphate
  modified_base 13: mod_base = OTHER; note = 2'-O-methylcytidine-3'-phosphate
  modified_base 14: mod_base = OTHER; note = 2'-O-methylcytidine-3'-phosphate
  modified_base 15: mod_base = OTHER; note = 2'-O-methyladenosine-3'-phosphate
  modified_base 16: mod_base = OTHER; note = 2'-O-methylguanosine-3'-phosphate
  modified_base 17: mod_base = OTHER; note = 2'-O-methylguanosine-3'-phosphate
  modified_base 18: mod_base = OTHER; note = 2'-O-methyladenosine-3'-phosphate
  modified_base 19: mod_base = OTHER; note = 2'-O-methyladenosine-3'-phosphate
  modified_base 20: mod_base = OTHER; note = 2'-O-methylcytidine-3'-phosphate
  modified_base 21: mod_base = OTHER; note = 2'-O-methyluridine-3'-phosphate ((2S,4R)-1-[29-[[2-(acetylamino)-2-deoxy-beta-D-galactopyra nosyl]oxy]-14,14-bis[[3-[[3-[[5-[[2-(acetylamino)-2-deoxy-b eta-D-galactopyranosyl]oxy]-1-oxopentyl]amino]propyl]amino] -3-oxopropoxy]methyl]-1,12,19,25-tetraoxo-16-oxa-13,20,24-t riazanonacos-1-yl]-4-hydroxy-2-pyrrolidinyl)methyl ester
gaggcagctgctccaggaact

SEQ ID NO: 578 - RNA, 23 nt, synthetic construct
  source 1..23: mol_type = other RNA
  modified_base 1: mod_base = OTHER; note = 2'-O-methyladenosine-3'-phosphorothioate
  modified_base 2: mod_base = OTHER; note = 2'-deoxy-2'-fluoroguanosine-3'-phosphorothioate
  modified_base 3: mod_base = OTHER; note = 2'-O-methyluridine-3'-phosphate
  modified_base 4: mod_base = OTHER; note = 2'-O-methyluridine-3'-phosphate
  modified_base 5: mod_base = OTHER; note = 2'-O-methylcytidine-3'-phosphate
  modified_base 6: mod_base = OTHER; note = 2'-deoxy-2'-fluorocytidine-3'-phosphate
  modified_base 7: mod_base = OTHER; note = 2'-O-methyluridine-3'-phosphate
  modified_base 8: mod_base = OTHER; note = 2'-deoxy-2'-fluoroguanosine-3'-phosphate
  modified_base 9: mod_base = OTHER; note = 2'-deoxy-2'-fluoroguanosine-3'-phosphate
  modified_base 10: mod_base = OTHER; note = 2'-O-methyladenosine-3'-phosphate
  modified_base 11: mod_base = OTHER; note = 2'-O-methylguanosine-3'-phosphate
  modified_base 12: mod_base = OTHER; note = 2'-O-methylcytidine-3'-phosphate
  modified_base 13: mod_base = OTHER; note = 2'-O-methyladenosine-3'-phosphate
  modified_base 14: mod_base = OTHER; note = 2'-deoxy-2'-fluoroguanosine-3'-phosphate
  modified_base 15: mod_base = OTHER; note = 2'-O-methylcytidine-3'-phosphate
  modified_base 16: mod_base = OTHER; note = 2'-deoxy-2'-fluorouridine-3'-phosphate
  modified_base 17: mod_base = OTHER; note = 2'-O-methylguanosine-3'-phosphate
  modified_base 18: mod_base = OTHER; note = 2'-O-methylcytidine-3'-phosphate
  modified_base 19: mod_base = OTHER; note = 2'-O-methylcytidine-3'-phosphate
  modified_base 20: mod_base = OTHER; note = 2'-O-methyluridine-3'-phosphate
  modified_base 21: mod_base = OTHER; note = 2'-O-methylcytidine-3'-phosphorothioate
  modified_base 22: mod_base = OTHER; note = 2'-O-methyluridine-3'-phosphorothioate
  modified_base 23: mod_base = OTHER; note = 2'-O-methyladenosine
agttcctggagcagctgcctcta

SEQ ID NO: 579 - RNA, 23 nt, synthetic construct
  source 1..23: mol_type = other RNA
tagaggcagctgctccaggaaca

SEQ ID NO: 580 - RNA, 21 nt, synthetic construct
  source 1..21: mol_type = other RNA
  modified_base 1: mod_base = OTHER; note = 2'-O-methylguanosine-3'-phosphorothioate
  modified_base 2: mod_base = OTHER; note = 2'-O-methyluridine-3'-phosphorothioate
  modified_base 3: mod_base = OTHER; note = 2'-O-methylguanosine-3'-phosphate
  modified_base 4: mod_base = OTHER; note = 2'-O-methylguanosine-3'-phosphate
  modified_base 5: mod_base = OTHER; note = 2'-O-methylcytidine-3'-phosphate
  modified_base 6: mod_base = OTHER; note = 2'-O-methyluridine-3'-phosphate
  modified_base 7: mod_base = OTHER; note = 2'-deoxy-2'-fluoroguanosine-3'-phosphate
  modified_base 8: mod_base = OTHER; note = 2'-O-methylcytidine-3'-phosphate
  modified_base 9: mod_base = OTHER; note = 2'-deoxy-2'-fluorocytidine-3'-phosphate
  modified_base 10: mod_base = OTHER; note = 2'-deoxy-2'-fluorouridine-3'-phosphate
  modified_base 11: mod_base = OTHER; note = 2'-deoxy-2'-fluoroguanosine-3'-phosphate
  modified_base 12: mod_base = OTHER; note = 2'-O-methyladenosine-3'-phosphate
  modified_base 13: mod_base = OTHER; note = 2'-O-methylguanosine-3'-phosphate
  modified_base 14: mod_base = OTHER; note = 2'-O-methyladenosine-3'-phosphate
  modified_base 15: mod_base = OTHER; note = 2'-O-methylcytidine-3'-phosphate
  modified_base 16: mod_base = OTHER; note = 2'-O-methylcytidine-3'-phosphate
  modified_base 17: mod_base = OTHER; note = 2'-O-methyluridine-3'-phosphate
  modified_base 18: mod_base = OTHER; note = 2'-O-methylcytidine-3'-phosphate
  modified_base 19: mod_base = OTHER; note = 2'-O-methyladenosine-3'-phosphate
  modified_base 20: mod_base = OTHER; note = 2'-O-methyladenosine-3'-phosphate
  modified_base 21: mod_base = OTHER; note = 2'-O-methyluridine-3'-phosphate ((2S,4R)-1-[29-[[2-(acetylamino)-2-deoxy-beta-D-galactopyra nosyl]oxy]-14,14-bis[[3-[[3-[[5-[[2-(acetylamino)-2-deoxy-b eta-D-galactopyranosyl]oxy]-1-oxopentyl]amino]propyl]amino] -3-oxopropoxy]methyl]-1,12,19,25-tetraoxo-16-oxa-13,20,24-t riazanonacos-1-yl]-4-hydroxy-2-pyrrolidinyl)methyl ester
gtggctgcctgagacctcaat

SEQ ID NO: 581 - RNA, 23 nt, synthetic construct
  source 1..23: mol_type = other RNA
  modified_base 1: mod_base = OTHER; note = 2'-O-methyladenosine-3'-phosphorothioate
  modified_base 2: mod_base = OTHER; note = 2'-deoxy-2'-fluorouridine-3'-phosphorothioate
  modified_base 3: mod_base = OTHER; note = 2'-O-methyluridine-3'-phosphate
  modified_base 4: mod_base = OTHER; note = 2'-O-methylguanosine-3'-phosphate
  modified_base 5: mod_base = OTHER; note = 2'-O-methyladenosine-3'-phosphate
  modified_base 6: mod_base = OTHER; note = 2'-deoxy-2'-fluoroguanosine-3'-phosphate
  modified_base 7: mod_base = OTHER; note = 2'-O-methylguanosine-3'-phosphate
  modified_base 8: mod_base = OTHER; note = 2'-deoxy-2'-fluorouridine-3'-phosphate
  modified_base 9: mod_base = OTHER; note = 2'-deoxy-2'-fluorocytidine-3'-phosphate
  modified_base 10: mod_base = OTHER; note = 2'-O-methyluridine-3'-phosphate
  modified_base 11: mod_base = OTHER; note = 2'-O-methylcytidine-3'-phosphate
  modified_base 12: mod_base = OTHER; note = 2'-O-methyladenosine-3'-phosphate
  modified_base 13: mod_base = OTHER; note = 2'-O-methylguanosine-3'-phosphate
  modified_base 14: mod_base = OTHER; note = 2'-deoxy-2'-fluoroguanosine-3'-phosphate
  modified_base 15: mod_base = OTHER; note = 2'-O-methylcytidine-3'-phosphate
  modified_base 16: mod_base = OTHER; note = 2'-deoxy-2'-fluoroadenosine-3'-phosphate
  modified_base 17: mod_base = OTHER; note = 2'-O-methylguanosine-3'-phosphate
  modified_base 18: mod_base = OTHER; note = 2'-O-methylcytidine-3'-phosphate
  modified_base 19: mod_base = OTHER; note = 2'-O-methylcytidine-3'-phosphate
  modified_base 20: mod_base = OTHER; note = 2'-O-methyladenosine-3'-phosphate
  modified_base 21: mod_base = OTHER; note = 2'-O-methylcytidine-3'-phosphorothioate
  modified_base 22: mod_base = OTHER; note = 2'-O-methylguanosine-3'-phosphorothioate
  modified_base 23: mod_base = OTHER; note = 2'-O-methylguanosine
attgaggtctcaggcagccacgg

SEQ ID NO: 582 - RNA, 23 nt, synthetic construct
  source 1..23: mol_type = other RNA
ccgtggctgcctgagacctcaat

SEQ ID NO: 583 - RNA, 21 nt, synthetic construct
  source 1..21: mol_type = other RNA
  modified_base 1: mod_base = OTHER; note = 2'-O-methylguanosine-3'-phosphorothioate
  modified_base 2: mod_base = OTHER; note = 2'-O-methylcytidine-3'-phosphorothioate
  modified_base 3: mod_base = OTHER; note = 2'-O-methyluridine-3'-phosphate
  modified_base 4: mod_base = OTHER; note = 2'-O-methylguanosine-3'-phosphate
  modified_base 5: mod_base = OTHER; note = 2'-O-methylguanosine-3'-phosphate
  modified_base 6: mod_base = OTHER; note = 2'-O-methylguanosine-3'-phosphate
  modified_base 7: mod_base = OTHER; note = 2'-deoxy-2'-fluorouridine-3'-phosphate
  modified_base 8: mod_base = OTHER; note = 2'-O-methylguanosine-3'-phosphate
  modified_base 9: mod_base = OTHER; note = 2'-deoxy-2'-fluoroadenosine-3'-phosphate
  modified_base 10: mod_base = OTHER; note = 2'-deoxy-2'-fluorocytidine-3'-phosphate
  modified_base 11: mod_base = OTHER; note = 2'-deoxy-2'-fluorocytidine-3'-phosphate
  modified_base 12: mod_base = OTHER; note = 2'-O-methylguanosine-3'-phosphate
  modified_base 13: mod_base = OTHER; note = 2'-O-methyladenosine-3'-phosphate
  modified_base 14: mod_base = OTHER; note = 2'-O-methyluridine-3'-phosphate
  modified_base 15: mod_base = OTHER; note = 2'-O-methylguanosine-3'-phosphate
  modified_base 16: mod_base = OTHER; note = 2'-O-methylguanosine-3'-phosphate
  modified_base 17: mod_base = OTHER; note = 2'-O-methylcytidine-3'-phosphate
  modified_base 18: mod_base = OTHER; note = 2'-O-methyluridine-3'-phosphate
  modified_base 19: mod_base = OTHER; note = 2'-O-methyluridine-3'-phosphate
  modified_base 20: mod_base = OTHER; note = 2'-O-methylcytidine-3'-phosphate
  modified_base 21: mod_base = OTHER; note = 2'-O-methyluridine-3'-phosphate ((2S,4R)-1-[29-[[2-(acetylamino)-2-deoxy-beta-D-galactopyra nosyl]oxy]-14,14-bis[[3-[[3-[[5-[[2-(acetylamino)-2-deoxy-b eta-D-galactopyranosyl]oxy]-1-oxopentyl]amino]propyl]amino] -3-oxopropoxy]methyl]-1,12,19,25-tetraoxo-16-oxa-13,20,24-t riazanonacos-1-yl]-4-hydroxy-2-pyrrolidinyl)methyl ester
gctgggtgaccgatggcttct

SEQ ID NO: 584 - RNA, 23 nt, synthetic construct
  source 1..23: mol_type = other RNA
  modified_base 1: mod_base = OTHER; note = 2'-O-methyladenosine-3'-phosphorothioate
  modified_base 2: mod_base = OTHER; note = 2'-deoxy-2'-fluoroguanosine-3'-phosphorothioate
  modified_base 3: mod_base = OTHER; note = 2'-O-methyladenosine-3'-phosphate
  modified_base 4: mod_base = OTHER; note = 2'-O-methyladenosine-3'-phosphate
  modified_base 5: mod_base = OTHER; note = 2'-O-methylguanosine-3'-phosphate
  modified_base 6: mod_base = OTHER; note = 2'-deoxy-2'-fluorocytidine-3'-phosphate
  modified_base 7: mod_base = OTHER; note = 2'-O-methylcytidine-3'-phosphate
  modified_base 8: mod_base = OTHER; note = 2'-deoxy-2'-fluoroadenosine-3'-phosphate
  modified_base 9: mod_base = OTHER; note = 2'-deoxy-2'-fluorouridine-3'-phosphate
  modified_base 10: mod_base = OTHER; note = 2'-O-methylcytidine-3'-phosphate
  modified_base 11: mod_base = OTHER; note = 2'-O-methylguanosine-3'-phosphate
  modified_base 12: mod_base = OTHER; note = 2'-O-methylguanosine-3'-phosphate
  modified_base 13: mod_base = OTHER; note = 2'-O-methyluridine-3'-phosphate
  modified_base 14: mod_base = OTHER; note = 2'-deoxy-2'-fluorocytidine-3'-phosphate
  modified_base 15: mod_base = OTHER; note = 2'-O-methyladenosine-3'-phosphate
  modified_base 16: mod_base = OTHER; note = 2'-deoxy-2'-fluorocytidine-3'-phosphate
  modified_base 17: mod_base = OTHER; note = 2'-O-methylcytidine-3'-phosphate
  modified_base 18: mod_base = OTHER; note = 2'-O-methylcytidine-3'-phosphate
  modified_base 19: mod_base = OTHER; note = 2'-O-methyladenosine-3'-phosphate
  modified_base 20: mod_base = OTHER; note = 2'-O-methylguanosine-3'-phosphate
  modified_base 21: mod_base = OTHER; note = 2'-O-methylcytidine-3'-phosphorothioate
  modified_base 22: mod_base = OTHER; note = 2'-O-methylcytidine-3'-phosphorothioate
  modified_base 23: mod_base = OTHER; note = 2'-O-methylcytidine
agaagccatcggtcacccagccc

SEQ ID NO: 585 - RNA, 23 nt, synthetic construct
  source 1..23: mol_type = other RNA
gggctgggtgaccgatggcttca

SEQ ID NO: 586 - RNA, 21 nt, synthetic construct
  source 1..21: mol_type = other RNA
  modified_base 1: mod_base = OTHER; note = 2'-O-methylguanosine-3'-phosphorothioate
  modified_base 2: mod_base = OTHER; note = 2'-O-methylguanosine-3'-phosphorothioate
  modified_base 3: mod_base = OTHER; note = 2'-O-methyladenosine-3'-phosphate
  modified_base 4: mod_base = OTHER; note = 2'-O-methylguanosine-3'-phosphate
  modified_base 5: mod_base = OTHER; note = 2'-O-methylcytidine-3'-phosphate
  modified_base 6: mod_base = OTHER; note = 2'-O-methyladenosine-3'-phosphate
  modified_base 7: mod_base = OTHER; note = 2'-deoxy-2'-fluorocytidine-3'-phosphate
  modified_base 8: mod_base = OTHER; note = 2'-O-methylcytidine-3'-phosphate
  modified_base 9: mod_base = OTHER; note = 2'-deoxy-2'-fluoroguanosine-3'-phosphate
  modified_base 10: mod_base = OTHER; note = 2'-deoxy-2'-fluorouridine-3'-phosphate
  modified_base 11: mod_base = OTHER; note = 2'-deoxy-2'-fluorouridine-3'-phosphate
  modified_base 12: mod_base = OTHER; note = 2'-O-methyladenosine-3'-phosphate
  modified_base 13: mod_base = OTHER; note = 2'-O-methyladenosine-3'-phosphate
  modified_base 14: mod_base = OTHER; note = 2'-O-methylguanosine-3'-phosphate
  modified_base 15: mod_base = OTHER; note = 2'-O-methylguanosine-3'-phosphate
  modified_base 16: mod_base = OTHER; note = 2'-O-methyladenosine-3'-phosphate
  modified_base 17: mod_base = OTHER; note = 2'-O-methylcytidine-3'-phosphate
  modified_base 18: mod_base = OTHER; note = 2'-O-methyladenosine-3'-phosphate
  modified_base 19: mod_base = OTHER; note = 2'-O-methyladenosine-3'-phosphate
  modified_base 20: mod_base = OTHER; note = 2'-O-methylguanosine-3'-phosphate
  modified_base 21: mod_base = OTHER; note = 2'-O-methyluridine-3'-phosphate ((2S,4R)-1-[29-[[2-(acetylamino)-2-deoxy-beta-D-galactopyra nosyl]oxy]-14,14-bis[[3-[[3-[[5-[[2-(acetylamino)-2-deoxy-b eta-D-galactopyranosyl]oxy]-1-oxopentyl]amino]propyl]amino] -3-oxopropoxy]methyl]-1,12,19,25-tetraoxo-16-oxa-13,20,24-t riazanonacos-1-yl]-4-hydroxy-2-pyrrolidinyl)methyl ester
ggagcaccgttaaggacaagt

SEQ ID NO: 587 - RNA, 23 nt, synthetic construct
  source 1..23: mol_type = other RNA
  modified_base 1: mod_base = OTHER; note = 2'-O-methyladenosine-3'-phosphorothioate
  modified_base 2: mod_base = OTHER; note = 2'-deoxy-2'-fluorocytidine-3'-phosphorothioate
  modified_base 3: mod_base = OTHER; note = 2'-O-methyluridine-3'-phosphate
  modified_base 4: mod_base = OTHER; note = 2'-O-methyluridine-3'-phosphate
  modified_base 5: mod_base = OTHER; note = 2'-O-methylguanosine-3'-phosphate
  modified_base 6: mod_base = OTHER; note = 2'-deoxy-2'-fluorouridine-3'-phosphate
  modified_base 7: mod_base = OTHER; note = 2'-O-methylcytidine-3'-phosphate
  modified_base 8: mod_base = OTHER; note = 2'-deoxy-2'-fluorocytidine-3'-phosphate
  modified_base 9: mod_base = OTHER; note = 2'-deoxy-2'-fluorouridine-3'-phosphate
  modified_base 10: mod_base = OTHER; note = 2'-O-methyluridine-3'-phosphate
  modified_base 11: mod_base = OTHER; note = 2'-O-methyladenosine-3'-phosphate
  modified_base 12: mod_base = OTHER; note = 2'-O-methyladenosine-3'-phosphate
  modified_base 13: mod_base = OTHER; note = 2'-O-methylcytidine-3'-phosphate
  modified_base 14: mod_base = OTHER; note = 2'-deoxy-2'-fluoroguanosine-3'-phosphate
  modified_base 15: mod_base = OTHER; note = 2'-O-methylguanosine-3'-phosphate
  modified_base 16: mod_base = OTHER; note = 2'-deoxy-2'-fluorouridine-3'-phosphate
  modified_base 17: mod_base = OTHER; note = 2'-O-methylguanosine-3'-phosphate
  modified_base 18: mod_base = OTHER; note = 2'-O-methylcytidine-3'-phosphate
  modified_base 19: mod_base = OTHER; note = 2'-O-methyluridine-3'-phosphate
  modified_base 20: mod_base = OTHER; note = 2'-O-methylcytidine-3'-phosphate
  modified_base 21: mod_base = OTHER; note = 2'-O-methylcytidine-3'-phosphorothioate
  modified_base 22: mod_base = OTHER; note = 2'-O-methyladenosine-3'-phosphorothioate
  modified_base 23: mod_base = OTHER; note = 2'-O-methylguanosine
acttgtccttaacggtgctccag

SEQ ID NO: 588 - RNA, 23 nt, synthetic construct
  source 1..23: mol_type = other RNA
ctggagcaccgttaaggacaagt

SEQ ID NO: 589 - RNA, 21 nt, synthetic construct
  source 1..21: mol_type = other RNA
  modified_base 1: mod_base = OTHER; note = 2'-O-methylcytidine-3'-phosphorothioate
  modified_base 2: mod_base = OTHER; note = 2'-O-methyluridine-3'-phosphorothioate
  modified_base 3: mod_base = OTHER; note = 2'-O-methylguanosine-3'-phosphate
  modified_base 4: mod_base = OTHER; note = 2'-O-methyluridine-3'-phosphate
  modified_base 5: mod_base = OTHER; note = 2'-O-methyladenosine-3'-phosphate
  modified_base 6: mod_base = OTHER; note = 2'-O-methylguanosine-3'-phosphate
  modified_base 7: mod_base = OTHER; note = 2'-deoxy-2'-fluoroguanosine-3'-phosphate
  modified_base 8: mod_base = OTHER; note = 2'-O-methyluridine-3'-phosphate
  modified_base 9: mod_base = OTHER; note = 2'-deoxy-2'-fluorouridine-3'-phosphate
  modified_base 10: mod_base = OTHER; note = 2'-deoxy-2'-fluoroguanosine-3'-phosphate
  modified_base 11: mod_base = OTHER; note = 2'-deoxy-2'-fluorocytidine-3'-phosphate
  modified_base 12: mod_base = OTHER; note = 2'-O-methyluridine-3'-phosphate
  modified_base 13: mod_base = OTHER; note = 2'-O-methyluridine-3'-phosphate
  modified_base 14: mod_base = OTHER; note = 2'-O-methyladenosine-3'-phosphate
  modified_base 15: mod_base = OTHER; note = 2'-O-methyladenosine-3'-phosphate
  modified_base 16: mod_base = OTHER; note = 2'-O-methyladenosine-3'-phosphate
  modified_base 17: mod_base = OTHER; note = 2'-O-methyladenosine-3'-phosphate
  modified_base 18: mod_base = OTHER; note = 2'-O-methylguanosine-3'-phosphate
  modified_base 19: mod_base = OTHER; note = 2'-O-methylguanosine-3'-phosphate
  modified_base 20: mod_base = OTHER; note = 2'-O-methylguanosine-3'-phosphate
  modified_base 21: mod_base = OTHER; note = 2'-O-methyluridine-3'-phosphate ((2S,4R)-1-[29-[[2-(acetylamino)-2-deoxy-beta-D-galactopyra nosyl]oxy]-14,14-bis[[3-[[3-[[5-[[2-(acetylamino)-2-deoxy-b eta-D-galactopyranosyl]oxy]-1-oxopentyl]amino]propyl]amino] -3-oxopropoxy]methyl]-1,12,19,25-tetraoxo-16-oxa-13,20,24-t riazanonacos-1-yl]-4-hydroxy-2-pyrrolidinyl)methyl ester
ctgtaggttgcttaaaagggt

SEQ ID NO: 590 - RNA, 23 nt, synthetic construct
  source 1..23: mol_type = other RNA
  modified_base 1: mod_base = OTHER; note = 2'-O-methyladenosine-3'-phosphorothioate
  modified_base 2: mod_base = OTHER; note = 2'-deoxy-2'-fluorocytidine-3'-phosphorothioate
  modified_base 3: mod_base = OTHER; note = 2'-O-methylcytidine-3'-phosphate
  modified_base 4: mod_base = OTHER; note = 2'-O-methylcytidine-3'-phosphate
  modified_base 5: mod_base = OTHER; note = 2'-O-methyluridine-3'-phosphate
  modified_base 6: mod_base = OTHER; note = 2'-deoxy-2'-fluorouridine-3'-phosphate
  modified_base 7: mod_base = OTHER; note = 2'-O-methyluridine-3'-phosphate
  modified_base 8: mod_base = OTHER; note = 2'-deoxy-2'-fluorouridine-3'-phosphate
  modified_base 9: mod_base = OTHER; note = 2'-deoxy-2'-fluoroadenosine-3'-phosphate
  modified_base 10: mod_base = OTHER; note = 2'-O-methyladenosine-3'-phosphate
  modified_base 11: mod_base = OTHER; note = 2'-O-methylguanosine-3'-phosphate
  modified_base 12: mod_base = OTHER; note = 2'-O-methylcytidine-3'-phosphate
  modified_base 13: mod_base = OTHER; note = 2'-O-methyladenosine-3'-phosphate
  modified_base 14: mod_base = OTHER; note = 2'-deoxy-2'-fluoroadenosine-3'-phosphate
  modified_base 15: mod_base = OTHER; note = 2'-O-methylcytidine-3'-phosphate
  modified_base 16: mod_base = OTHER; note = 2'-deoxy-2'-fluorocytidine-3'-phosphate
  modified_base 17: mod_base = OTHER; note = 2'-O-methyluridine-3'-phosphate
  modified_base 18: mod_base = OTHER; note = 2'-O-methyladenosine-3'-phosphate
  modified_base 19: mod_base = OTHER; note = 2'-O-methylcytidine-3'-phosphate
  modified_base 20: mod_base = OTHER; note = 2'-O-methyladenosine-3'-phosphate
  modified_base 21: mod_base = OTHER; note = 2'-O-methylguanosine-3'-phosphorothioate
  modified_base 22: mod_base = OTHER; note = 2'-O-methylguanosine-3'-phosphorothioate
  modified_base 23: mod_base = OTHER; note = 2'-O-methylguanosine
acccttttaagcaacctacaggg

SEQ ID NO: 591 - RNA, 23 nt, synthetic construct
  source 1..23: mol_type = other RNA
ccctgtaggttgcttaaaaggga

SEQ ID NO: 592 - RNA, 21 nt, synthetic construct
  source 1..21: mol_type = other RNA
  modified_base 1: mod_base = OTHER; note = 2'-O-methylguanosine-3'-phosphorothioate
  modified_base 2: mod_base = OTHER; note = 2'-O-methyluridine-3'-phosphorothioate
  modified_base 3: mod_base = OTHER; note = 2'-O-methyluridine-3'-phosphate
  modified_base 4: mod_base = OTHER; note = 2'-O-methylcytidine-3'-phosphate
  modified_base 5: mod_base = OTHER; note = 2'-O-methylcytidine-3'-phosphate
  modified_base 6: mod_base = OTHER; note = 2'-O-methylcytidine-3'-phosphate
  modified_base 7: mod_base = OTHER; note = 2'-deoxy-2'-fluorouridine-3'-phosphate
  modified_base 8: mod_base = OTHER; note = 2'-O-methylguanosine-3'-phosphate
  modified_base 9: mod_base = OTHER; note = 2'-deoxy-2'-fluoroadenosine-3'-phosphate
  modified_base 10: mod_base = OTHER; note = 2'-deoxy-2'-fluoroadenosine-3'-phosphate
  modified_base 11: mod_base = OTHER; note = 2'-deoxy-2'-fluoroadenosine-3'-phosphate
  modified_base 12: mod_base = OTHER; note = 2'-O-methylguanosine-3'-phosphate
  modified_base 13: mod_base = OTHER; note = 2'-O-methyladenosine-3'-phosphate
  modified_base 14: mod_base = OTHER; note = 2'-O-methylcytidine-3'-phosphate
  modified_base 15: mod_base = OTHER; note = 2'-O-methyluridine-3'-phosphate
  modified_base 16: mod_base = OTHER; note = 2'-O-methyladenosine-3'-phosphate
  modified_base 17: mod_base = OTHER; note = 2'-O-methylcytidine-3'-phosphate
  modified_base 18: mod_base = OTHER; note = 2'-O-methyluridine-3'-phosphate
  modified_base 19: mod_base = OTHER; note = 2'-O-methylguanosine-3'-phosphate
  modified_base 20: mod_base = OTHER; note = 2'-O-methylguanosine-3'-phosphate
  modified_base 21: mod_base = OTHER; note = 2'-O-methyluridine-3'-phosphate ((2S,4R)-1-[29-[[2-(acetylamino)-2-deoxy-beta-D-galactopyra nosyl]oxy]-14,14-bis[[3-[[3-[[5-[[2-(acetylamino)-2-deoxy-b eta-D-galactopyranosyl]oxy]-1-oxopentyl]amino]propyl]amino] -3-oxopropoxy]methyl]-1,12,19,25-tetraoxo-16-oxa-13,20,24-t riazanonacos-1-yl]-4-hydroxy-2-pyrrolidinyl)methyl ester
gttccctgaaagactactggt

SEQ ID NO: 593 - RNA, 23 nt, synthetic construct
  source 1..23: mol_type = other RNA
  modified_base 1: mod_base = OTHER; note = 2'-O-methyladenosine-3'-phosphorothioate
  modified_base 2: mod_base = OTHER; note = 2'-deoxy-2'-fluorocytidine-3'-phosphorothioate
  modified_base 3: mod_base = OTHER; note = 2'-O-methylcytidine-3'-phosphate
  modified_base 4: mod_base = OTHER; note = 2'-O-methyladenosine-3'-phosphate
  modified_base 5: mod_base = OTHER; note = 2'-O-methylguanosine-3'-phosphate
  modified_base 6: mod_base = OTHER; note = 2'-deoxy-2'-fluorouridine-3'-phosphate
  modified_base 7: mod_base = OTHER; note = 2'-O-methyladenosine-3'-phosphate
  modified_base 8: mod_base = OTHER; note = 2'-deoxy-2'-fluoroguanosine-3'-phosphate
  modified_base 9: mod_base = OTHER; note = 2'-deoxy-2'-fluorouridine-3'-phosphate
  modified_base 10: mod_base = OTHER; note = 2'-O-methylcytidine-3'-phosphate
  modified_base 11: mod_base = OTHER; note = 2'-O-methyluridine-3'-phosphate
  modified_base 12: mod_base = OTHER; note = 2'-O-methyluridine-3'-phosphate
  modified_base 13: mod_base = OTHER; note = 2'-O-methyluridine-3'-phosphate
  modified_base 14: mod_base = OTHER; note = 2'-deoxy-2'-fluorocytidine-3'-phosphate
  modified_base 15: mod_base = OTHER; note = 2'-O-methyladenosine-3'-phosphate
  modified_base 16: mod_base = OTHER; note = 2'-deoxy-2'-fluoroguanosine-3'-phosphate
  modified_base 17: mod_base = OTHER; note = 2'-O-methylguanosine-3'-phosphate
  modified_base 18: mod_base = OTHER; note = 2'-O-methylguanosine-3'-phosphate
  modified_base 19: mod_base = OTHER; note = 2'-O-methyladenosine-3'-phosphate
  modified_base 20: mod_base = OTHER; note = 2'-O-methyladenosine-3'-phosphate
  modified_base 21: mod_base = OTHER; note = 2'-O-methylcytidine-3'-phosphorothioate
  modified_base 22: mod_base = OTHER; note = 2'-O-methyluridine-3'-phosphorothioate
  modified_base 23: mod_base = OTHER; note = 2'-O-methylguanosine
accagtagtctttcagggaactg

SEQ ID NO: 594 - RNA, 23 nt, synthetic construct
  source 1..23: mol_type = other RNA
cagttccctgaaagactactgga

SEQ ID NO: 595 - RNA, 21 nt, synthetic construct
  source 1..21: mol_type = other RNA
  modified_base 1: mod_base = OTHER; note = 2'-O-methylguanosine-3'-phosphorothioate
  modified_base 2: mod_base = OTHER; note = 2'-O-methylguanosine-3'-phosphorothioate
  modified_base 3: mod_base = OTHER; note = 2'-O-methylguanosine-3'-phosphate
  modified_base 4: mod_base = OTHER; note = 2'-O-methylcytidine-3'-phosphate
  modified_base 5: mod_base = OTHER; note = 2'-O-methyluridine-3'-phosphate
  modified_base 6: mod_base = OTHER; note = 2'-O-methylguanosine-3'-phosphate
  modified_base 7: mod_base = OTHER; note = 2'-deoxy-2'-fluoroguanosine-3'-phosphate
  modified_base 8: mod_base = OTHER; note = 2'-O-methylguanosine-3'-phosphate
  modified_base 9: mod_base = OTHER; note = 2'-deoxy-2'-fluorouridine-3'-phosphate
  modified_base 10: mod_base = OTHER; note = 2'-deoxy-2'-fluoroguanosine-3'-phosphate
  modified_base 11: mod_base = OTHER; note = 2'-deoxy-2'-fluoroadenosine-3'-phosphate
  modified_base 12: mod_base = OTHER; note = 2'-O-methylcytidine-3'-phosphate
  modified_base 13: mod_base = OTHER; note = 2'-O-methylcytidine-3'-phosphate
  modified_base 14: mod_base = OTHER; note = 2'-O-methylguanosine-3'-phosphate
  modified_base 15: mod_base = OTHER; note = 2'-O-methyladenosine-3'-phosphate
  modified_base 16: mod_base = OTHER; note = 2'-O-methyluridine-3'-phosphate
  modified_base 17: mod_base = OTHER; note = 2'-O-methylguanosine-3'-phosphate
  modified_base 18: mod_base = OTHER; note = 2'-O-methylguanosine-3'-phosphate
  modified_base 19: mod_base = OTHER; note = 2'-O-methylcytidine-3'-phosphate
  modified_base 20: mod_base = OTHER; note = 2'-O-methyluridine-3'-phosphate
  modified_base 21: mod_base = OTHER; note = 2'-O-methyluridine-3'-phosphate ((2S,4R)-1-[29-[[2-(acetylamino)-2-deoxy-beta-D-galactopyra nosyl]oxy]-14,14-bis[[3-[[3-[[5-[[2-(acetylamino)-2-deoxy-b eta-D-galactopyranosyl]oxy]-1-oxopentyl]amino]propyl]amino] -3-oxopropoxy]methyl]-1,12,19,25-tetraoxo-16-oxa-13,20,24-t riazanonacos-1-yl]-4-hydroxy-2-pyrrolidinyl)methyl ester
gggctgggtgaccgatggctt

SEQ ID NO: 596 - RNA, 23 nt, synthetic construct
  source 1..23: mol_type = other RNA
  modified_base 1: mod_base = OTHER; note = 2'-O-methyladenosine-3'-phosphorothioate
  modified_base 2: mod_base = OTHER; note = 2'-deoxy-2'-fluoroadenosine-3'-phosphorothioate
  modified_base 3: mod_base = OTHER; note = 2'-O-methylguanosine-3'-phosphate
  modified_base 4: mod_base = OTHER; note = 2'-O-methylcytidine-3'-phosphate
  modified_base 5: mod_base = OTHER; note = 2'-O-methylcytidine-3'-phosphate
  modified_base 6: mod_base = OTHER; note = 2'-deoxy-2'-fluoroadenosine-3'-phosphate
  modified_base 7: mod_base = OTHER; note = 2'-O-methyluridine-3'-phosphate
  modified_base 8: mod_base = OTHER; note = 2'-deoxy-2'-fluorocytidine-3'-phosphate
  modified_base 9: mod_base = OTHER; note = 2'-deoxy-2'-fluoroguanosine-3'-phosphate
  modified_base 10: mod_base = OTHER; note = 2'-O-methylguanosine-3'-phosphate
  modified_base 11: mod_base = OTHER; note = 2'-O-methyluridine-3'-phosphate
  modified_base 12: mod_base = OTHER; note = 2'-O-methylcytidine-3'-phosphate
  modified_base 13: mod_base = OTHER; note = 2'-O-methyladenosine-3'-phosphate
  modified_base 14: mod_base = OTHER; note = 2'-deoxy-2'-fluorocytidine-3'-phosphate
  modified_base 15: mod_base = OTHER; note = 2'-O-methylcytidine-3'-phosphate
  modified_base 16: mod_base = OTHER; note = 2'-deoxy-2'-fluorocytidine-3'-phosphate
  modified_base 17: mod_base = OTHER; note = 2'-O-methyladenosine-3'-phosphate
  modified_base 18: mod_base = OTHER; note = 2'-O-methylguanosine-3'-phosphate
  modified_base 19: mod_base = OTHER; note = 2'-O-methylcytidine-3'-phosphate
  modified_base 20: mod_base = OTHER; note = 2'-O-methylcytidine-3'-phosphate
  modified_base 21: mod_base = OTHER; note = 2'-O-methylcytidine-3'-phosphorothioate
  modified_base 22: mod_base = OTHER; note = 2'-O-methylcytidine-3'-phosphorothioate
  modified_base 23: mod_base = OTHER; note = 2'-O-methyluridine
aagccatcggtcacccagcccct

SEQ ID NO: 597 - RNA, 23 nt, synthetic construct
  source 1..23: mol_type = other RNA
aggggctgggtgaccgatggctt

SEQ ID NO: 598 - RNA, 21 nt, synthetic construct
  source 1..21: mol_type = other RNA
  modified_base 1: mod_base = OTHER; note = 2'-O-methylguanosine-3'-phosphorothioate
  modified_base 2: mod_base = OTHER; note = 2'-O-methylcytidine-3'-phosphorothioate
  modified_base 3: mod_base = OTHER; note = 2'-O-methylcytidine-3'-phosphate
  modified_base 4: mod_base = OTHER; note = 2'-O-methyladenosine-3'-phosphate
  modified_base 5: mod_base = OTHER; note = 2'-O-methylcytidine-3'-phosphate
  modified_base 6: mod_base = OTHER; note = 2'-O-methylcytidine-3'-phosphate
  modified_base 7: mod_base = OTHER; note = 2'-deoxy-2'-fluoroadenosine-3'-phosphate
  modified_base 8: mod_base = OTHER; note = 2'-O-methyladenosine-3'-phosphate
  modified_base 9: mod_base = OTHER; note = 2'-deoxy-2'-fluoroguanosine-3'-phosphate
  modified_base 10: mod_base = OTHER; note = 2'-deoxy-2'-fluoroadenosine-3'-phosphate
  modified_base 11: mod_base = OTHER; note = 2'-deoxy-2'-fluorocytidine-3'-phosphate
  modified_base 12: mod_base = OTHER; note = 2'-O-methylcytidine-3'-phosphate
  modified_base 13: mod_base = OTHER; note = 2'-O-methylguanosine-3'-phosphate
  modified_base 14: mod_base = OTHER; note = 2'-O-methylcytidine-3'-phosphate
  modified_base 15: mod_base = OTHER; note = 2'-O-methylcytidine-3'-phosphate
  modified_base 16: mod_base = OTHER; note = 2'-O-methyladenosine-3'-phosphate
  modified_base 17: mod_base = OTHER; note = 2'-O-methyladenosine-3'-phosphate
  modified_base 18: mod_base = OTHER; note = 2'-O-methylguanosine-3'-phosphate
  modified_base 19: mod_base = OTHER; note = 2'-O-methylguanosine-3'-phosphate
  modified_base 20: mod_base = OTHER; note = 2'-O-methyladenosine-3'-phosphate
  modified_base 21: mod_base = OTHER; note = 2'-O-methyluridine-3'-phosphate ((2S,4R)-1-[29-[[2-(acetylamino)-2-deoxy-beta-D-galactopyra nosyl]oxy]-14,14-bis[[3-[[3-[[5-[[2-(acetylamino)-2-deoxy-b eta-D-galactopyranosyl]oxy]-1-oxopentyl]amino]propyl]amino] -3-oxopropoxy]methyl]-1,12,19,25-tetraoxo-16-oxa-13,20,24-t riazanonacos-1-yl]-4-hydroxy-2-pyrrolidinyl)methyl ester
gccaccaagaccgccaaggat

SEQ ID NO: 599 - RNA, 23 nt, synthetic construct
  source 1..23: mol_type = other RNA
  modified_base 1: mod_base = OTHER; note = 2'-O-methyladenosine-3'-phosphorothioate
  modified_base 2: mod_base = OTHER; note = 2'-deoxy-2'-fluorouridine-3'-phosphorothioate
  modified_base 3: mod_base = OTHER; note = 2'-O-methylcytidine-3'-phosphate
  modified_base 4: mod_base = OTHER; note = 2'-O-methylcytidine-3'-phosphate
  modified_base 5: mod_base = OTHER; note = 2'-O-methyluridine-3'-phosphate
  modified_base 6: mod_base = OTHER; note = 2'-deoxy-2'-fluorouridine-3'-phosphate
  modified_base 7: mod_base = OTHER; note = 2'-O-methylguanosine-3'-phosphate
  modified_base 8: mod_base = OTHER; note = 2'-deoxy-2'-fluoroguanosine-3'-phosphate
  modified_base 9: mod_base = OTHER; note = 2'-deoxy-2'-fluorocytidine-3'-phosphate
  modified_base 10: mod_base = OTHER; note = 2'-O-methylguanosine-3'-phosphate
  modified_base 11: mod_base = OTHER; note = 2'-O-methylguanosine-3'-phosphate
  modified_base 12: mod_base = OTHER; note = 2'-O-methyluridine-3'-phosphate
  modified_base 13: mod_base = OTHER; note = 2'-O-methylcytidine-3'-phosphate
  modified_base 14: mod_base = OTHER; note = 2'-deoxy-2'-fluorouridine-3'-phosphate
  modified_base 15: mod_base = OTHER; note = 2'-O-methyluridine-3'-phosphate
  modified_base 16: mod_base = OTHER; note = 2'-deoxy-2'-fluoroguanosine-3'-phosphate
  modified_base 17: mod_base = OTHER; note = 2'-O-methylguanosine-3'-phosphate
  modified_base 18: mod_base = OTHER; note = 2'-O-methyluridine-3'-phosphate
  modified_base 19: mod_base = OTHER; note = 2'-O-methylguanosine-3'-phosphate
  modified_base 20: mod_base = OTHER; note = 2'-O-methylguanosine-3'-phosphate
  modified_base 21: mod_base = OTHER; note = 2'-O-methylcytidine-3'-phosphorothioate
  modified_base 22: mod_base = OTHER; note = 2'-O-methylguanosine-3'-phosphorothioate
  modified_base 23: mod_base = OTHER; note = 2'-O-methyluridine
atccttggcggtcttggtggcgt

SEQ ID NO: 600 - RNA, 23 nt, synthetic construct
  source 1..23: mol_type = other RNA
acgccaccaagaccgccaaggat

SEQ ID NO: 601 - RNA, 21 nt, synthetic construct
  source 1..21: mol_type = other RNA
  modified_base 1: mod_base = OTHER; note = 2'-O-methyladenosine-3'-phosphorothioate
  modified_base 2: mod_base = OTHER; note = 2'-O-methylguanosine-3'-phosphorothioate
  modified_base 3: mod_base = OTHER; note = 2'-O-methyladenosine-3'-phosphate
  modified_base 4: mod_base = OTHER; note = 2'-O-methylguanosine-3'-phosphate
  modified_base 5: mod_base = OTHER; note = 2'-O-methylguanosine-3'-phosphate
  modified_base 6: mod_base = OTHER; note = 2'-O-methylcytidine-3'-phosphate
  modified_base 7: mod_base = OTHER; note = 2'-deoxy-2'-fluoroadenosine-3'-phosphate
  modified_base 8: mod_base = OTHER; note = 2'-O-methylguanosine-3'-phosphate
  modified_base 9: mod_base = OTHER; note = 2'-deoxy-2'-fluorocytidine-3'-phosphate
  modified_base 10: mod_base = OTHER; note = 2'-deoxy-2'-fluorouridine-3'-phosphate
  modified_base 11: mod_base = OTHER; note = 2'-deoxy-2'-fluoroguanosine-3'-phosphate
  modified_base 12: mod_base = OTHER; note = 2'-O-methylcytidine-3'-phosphate
  modified_base 13: mod_base = OTHER; note = 2'-O-methyluridine-3'-phosphate
  modified_base 14: mod_base = OTHER; note = 2'-O-methylcytidine-3'-phosphate
  modified_base 15: mod_base = OTHER; note = 2'-O-methylcytidine-3'-phosphate
  modified_base 16: mod_base = OTHER; note = 2'-O-methyladenosine-3'-phosphate
  modified_base 17: mod_base = OTHER; note = 2'-O-methylguanosine-3'-phosphate
  modified_base 18: mod_base = OTHER; note = 2'-O-methylguanosine-3'-phosphate
  modified_base 19: mod_base = OTHER; note = 2'-O-methyladenosine-3'-phosphate
  modified_base 20: mod_base = OTHER; note = 2'-O-methyladenosine-3'-phosphate
  modified_base 21: mod_base = OTHER; note = 2'-O-methyluridine-3'-phosphate ((2S,4R)-1-[29-[[2-(acetylamino)-2-deoxy-beta-D-galactopyra nosyl]oxy]-14,14-bis[[3-[[3-[[5-[[2-(acetylamino)-2-deoxy-b eta-D-galactopyranosyl]oxy]-1-oxopentyl]amino]propyl]amino] -3-oxopropoxy]methyl]-1,12,19,25-tetraoxo-16-oxa-13,20,24-t riazanonacos-1-yl]-4-hydroxy-2-pyrrolidinyl)methyl ester
agaggcagctgctccaggaat

SEQ ID NO: 602 - RNA, 23 nt, synthetic construct
  source 1..23: mol_type = other RNA
  modified_base 1: mod_base = OTHER; note = 2'-O-methyladenosine-3'-phosphorothioate
  modified_base 2: mod_base = OTHER; note = 2'-deoxy-2'-fluorouridine-3'-phosphorothioate
  modified_base 3: mod_base = OTHER; note = 2'-O-methyluridine-3'-phosphate
  modified_base 4: mod_base = OTHER; note = 2'-O-methylcytidine-3'-phosphate
  modified_base 5: mod_base = OTHER; note = 2'-O-methylcytidine-3'-phosphate
  modified_base 6: mod_base = OTHER; note = 2'-deoxy-2'-fluorouridine-3'-phosphate
  modified_base 7: mod_base = OTHER; note = 2'-O-methylguanosine-3'-phosphate
  modified_base 8: mod_base = OTHER; note = 2'-deoxy-2'-fluoroguanosine-3'-phosphate
  modified_base 9: mod_base = OTHER; note = 2'-deoxy-2'-fluoroadenosine-3'-phosphate
  modified_base 10: mod_base = OTHER; note = 2'-O-methylguanosine-3'-phosphate
  modified_base 11: mod_base = OTHER; note = 2'-O-methylcytidine-3'-phosphate
  modified_base 12: mod_base = OTHER; note = 2'-O-methyladenosine-3'-phosphate
  modified_base 13: mod_base = OTHER; note = 2'-O-methylguanosine-3'-phosphate
  modified_base 14: mod_base = OTHER; note = 2'-deoxy-2'-fluorocytidine-3'-phosphate
  modified_base 15: mod_base = OTHER; note = 2'-O-methyluridine-3'-phosphate
  modified_base 16: mod_base = OTHER; note = 2'-deoxy-2'-fluoroguanosine-3'-phosphate
  modified_base 17: mod_base = OTHER; note = 2'-O-methylcytidine-3'-phosphate
  modified_base 18: mod_base = OTHER; note = 2'-O-methylcytidine-3'-phosphate
  modified_base 19: mod_base = OTHER; note = 2'-O-methyluridine-3'-phosphate
  modified_base 20: mod_base = OTHER; note = 2'-O-methylcytidine-3'-phosphate
  modified_base 21: mod_base = OTHER; note = 2'-O-methyluridine-3'-phosphorothioate
  modified_base 22: mod_base = OTHER; note = 2'-O-methyladenosine-3'-phosphorothioate
  modified_base 23: mod_base = OTHER; note = 2'-O-methylguanosine
attcctggagcagctgcctctag

SEQ ID NO: 603 - RNA, 23 nt, synthetic construct
  source 1..23: mol_type = other RNA
ctagaggcagctgctccaggaac

SEQ ID NO: 604 - RNA, 21 nt, synthetic construct
  source 1..21: mol_type = other RNA
  modified_base 1: mod_base = OTHER; note = 2'-O-methyluridine-3'-phosphorothioate
  modified_base 2: mod_base = OTHER; note = 2'-O-methylcytidine-3'-phosphorothioate
  modified_base 3: mod_base = OTHER; note = 2'-O-methyladenosine-3'-phosphate
  modified_base 4: mod_base = OTHER; note = 2'-O-methyluridine-3'-phosphate
  modified_base 5: mod_base = OTHER; note = 2'-O-methylcytidine-3'-phosphate
  modified_base 6: mod_base = OTHER; note = 2'-O-methylcytidine-3'-phosphate
  modified_base 7: mod_base = OTHER; note = 2'-deoxy-2'-fluorocytidine-3'-phosphate
  modified_base 8: mod_base = OTHER; note = 2'-O-methyluridine-3'-phosphate
  modified_base 9: mod_base = OTHER; note = 2'-deoxy-2'-fluoroadenosine-3'-phosphate
  modified_base 10: mod_base = OTHER; note = 2'-deoxy-2'-fluoroguanosine-3'-phosphate
  modified_base 11: mod_base = OTHER; note = 2'-deoxy-2'-fluoroadenosine-3'-phosphate
  modified_base 12: mod_base = OTHER; note = 2'-O-methylguanosine-3'-phosphate
  modified_base 13: mod_base = OTHER; note = 2'-O-methylguanosine-3'-phosphate
  modified_base 14: mod_base = OTHER; note = 2'-O-methylcytidine-3'-phosphate
  modified_base 15: mod_base = OTHER; note = 2'-O-methyladenosine-3'-phosphate
  modified_base 16: mod_base = OTHER; note = 2'-O-methylguanosine-3'-phosphate
  modified_base 17: mod_base = OTHER; note = 2'-O-methylcytidine-3'-phosphate
  modified_base 18: mod_base = OTHER; note = 2'-O-methyluridine-3'-phosphate
  modified_base 19: mod_base = OTHER; note = 2'-O-methylguanosine-3'-phosphate
  modified_base 20: mod_base = OTHER; note = 2'-O-methylcytidine-3'-phosphate
  modified_base 21: mod_base = OTHER; note = 2'-O-methyluridine-3'-phosphate ((2S,4R)-1-[29-[[2-(acetylamino)-2-deoxy-beta-D-galactopyra nosyl]oxy]-14,14-bis[[3-[[3-[[5-[[2-(acetylamino)-2-deoxy-b eta-D-galactopyranosyl]oxy]-1-oxopentyl]amino]propyl]amino] -3-oxopropoxy]methyl]-1,12,19,25-tetraoxo-16-oxa-13,20,24-t riazanonacos-1-yl]-4-hydroxy-2-pyrrolidinyl)methyl ester
tcatccctagaggcagctgct

SEQ ID NO: 605 - RNA, 23 nt, synthetic construct
  source 1..23: mol_type = other RNA
  modified_base 1: mod_base = OTHER; note = 2'-O-methyladenosine-3'-phosphorothioate
  modified_base 2: mod_base = OTHER; note = 2'-deoxy-2'-fluoroguanosine-3'-phosphorothioate
  modified_base 3: mod_base = OTHER; note = 2'-O-methylcytidine-3'-phosphate
  modified_base 4: mod_base = OTHER; note = 2'-O-methyladenosine-3'-phosphate
  modified_base 5: mod_base = OTHER; note = 2'-O-methylguanosine-3'-phosphate
  modified_base 6: mod_base = OTHER; note = 2'-deoxy-2'-fluorocytidine-3'-phosphate
  modified_base 7: mod_base = OTHER; note = 2'-O-methyluridine-3'-phosphate
  modified_base 8: mod_base = OTHER; note = 2'-deoxy-2'-fluoroguanosine-3'-phosphate
  modified_base 9: mod_base = OTHER; note = 2'-deoxy-2'-fluorocytidine-3'-phosphate
  modified_base 10: mod_base = OTHER; note = 2'-O-methylcytidine-3'-phosphate
  modified_base 11: mod_base = OTHER; note = 2'-O-methyluridine-3'-phosphate
  modified_base 12: mod_base = OTHER; note = 2'-O-methylcytidine-3'-phosphate
  modified_base 13: mod_base = OTHER; note = 2'-O-methyluridine-3'-phosphate
  modified_base 14: mod_base = OTHER; note = 2'-deoxy-2'-fluoroadenosine-3'-phosphate
  modified_base 15: mod_base = OTHER; note = 2'-O-methylguanosine-3'-phosphate
  modified_base 16: mod_base = OTHER; note = 2'-deoxy-2'-fluoroguanosine-3'-phosphate
  modified_base 17: mod_base = OTHER; note = 2'-O-methylguanosine-3'-phosphate
  modified_base 18: mod_base = OTHER; note = 2'-O-methyladenosine-3'-phosphate
  modified_base 19: mod_base = OTHER; note = 2'-O-methyluridine-3'-phosphate
  modified_base 20: mod_base = OTHER; note = 2'-O-methylguanosine-3'-phosphate
  modified_base 21: mod_base = OTHER; note = 2'-O-methyladenosine-3'-phosphorothioate
  modified_base 22: mod_base = OTHER; note = 2'-O-methyladenosine-3'-phosphorothioate
  modified_base 23: mod_base = OTHER; note = 2'-O-methylcytidine
agcagctgcctctagggatgaac

SEQ ID NO: 606 - RNA, 23 nt, synthetic construct
  source 1..23: mol_type = other RNA
gttcatccctagaggcagctgct

SEQ ID NO: 607 - RNA, 21 nt, synthetic construct
  source 1..21: mol_type = other RNA
  modified_base 1: mod_base = OTHER; note = 2'-O-methyluridine-3'-phosphorothioate
  modified_base 2: mod_base = OTHER; note = 2'-O-methyluridine-3'-phosphorothioate
  modified_base 3: mod_base = OTHER; note = 2'-O-methylcytidine-3'-phosphate
  modified_base 4: mod_base = OTHER; note = 2'-O-methyladenosine-3'-phosphate
  modified_base 5: mod_base = OTHER; note = 2'-O-methyluridine-3'-phosphate
  modified_base 6: mod_base = OTHER; note = 2'-O-methylcytidine-3'-phosphate
  modified_base 7: mod_base = OTHER; note = 2'-deoxy-2'-fluorocytidine-3'-phosphate
  modified_base 8: mod_base = OTHER; note = 2'-O-methylcytidine-3'-phosphate
  modified_base 9: mod_base = OTHER; note = 2'-deoxy-2'-fluorouridine-3'-phosphate
  modified_base 10: mod_base = OTHER; note = 2'-deoxy-2'-fluoroadenosine-3'-phosphate
  modified_base 11: mod_base = OTHER; note = 2'-deoxy-2'-fluoroguanosine-3'-phosphate
  modified_base 12: mod_base = OTHER; note = 2'-O-methyladenosine-3'-phosphate
  modified_base 13: mod_base = OTHER; note = 2'-O-methylguanosine-3'-phosphate
  modified_base 14: mod_base = OTHER; note = 2'-O-methylguanosine-3'-phosphate
  modified_base 15: mod_base = OTHER; note = 2'-O-methylcytidine-3'-phosphate
  modified_base 16: mod_base = OTHER; note = 2'-O-methyladenosine-3'-phosphate
  modified_base 17: mod_base = OTHER; note = 2'-O-methylguanosine-3'-phosphate
  modified_base 18: mod_base = OTHER; note = 2'-O-methylcytidine-3'-phosphate
  modified_base 19: mod_base = OTHER; note = 2'-O-methyluridine-3'-phosphate
  modified_base 20: mod_base = OTHER; note = 2'-O-methylguanosine-3'-phosphate
  modified_base 21: mod_base = OTHER; note = 2'-O-methyluridine-3'-phosphate ((2S,4R)-1-[29-[[2-(acetylamino)-2-deoxy-beta-D-galactopyra nosyl]oxy]-14,14-bis[[3-[[3-[[5-[[2-(acetylamino)-2-deoxy-b eta-D-galactopyranosyl]oxy]-1-oxopentyl]amino]propyl]amino] -3-oxopropoxy]methyl]-1,12,19,25-tetraoxo-16-oxa-13,20,24-t riazanonacos-1-yl]-4-hydroxy-2-pyrrolidinyl)methyl ester
ttcatccctagaggcagctgt

SEQ ID NO: 608 - RNA, 23 nt, synthetic construct
  source 1..23: mol_type = other RNA
  modified_base 1: mod_base = OTHER; note = 2'-O-methyladenosine-3'-phosphorothioate
  modified_base 2: mod_base = OTHER; note = 2'-deoxy-2'-fluorocytidine-3'-phosphorothioate
  modified_base 3: mod_base = OTHER; note = 2'-O-methyladenosine-3'-phosphate
  modified_base 4: mod_base = OTHER; note = 2'-O-methylguanosine-3'-phosphate
  modified_base 5: mod_base = OTHER; note = 2'-O-methylcytidine-3'-phosphate
  modified_base 6: mod_base = OTHER; note = 2'-deoxy-2'-fluorouridine-3'-phosphate
  modified_base 7: mod_base = OTHER; note = 2'-O-methylguanosine-3'-phosphate
  modified_base 8: mod_base = OTHER; note = 2'-deoxy-2'-fluorocytidine-3'-phosphate
  modified_base 9: mod_base = OTHER; note = 2'-deoxy-2'-fluorocytidine-3'-phosphate
  modified_base 10: mod_base = OTHER; note = 2'-O-methyluridine-3'-phosphate
  modified_base 11: mod_base = OTHER; note = 2'-O-methylcytidine-3'-phosphate
  modified_base 12: mod_base = OTHER; note = 2'-O-methyluridine-3'-phosphate
  modified_base 13: mod_base = OTHER; note = 2'-O-methyladenosine-3'-phosphate
  modified_base 14: mod_base = OTHER; note = 2'-deoxy-2'-fluoroguanosine-3'-phosphate
  modified_base 15: mod_base = OTHER; note = 2'-O-methylguanosine-3'-phosphate
  modified_base 16: mod_base = OTHER; note = 2'-deoxy-2'-fluoroguanosine-3'-phosphate
  modified_base 17: mod_base = OTHER; note = 2'-O-methyladenosine-3'-phosphate
  modified_base 18: mod_base = OTHER; note = 2'-O-methyluridine-3'-phosphate
  modified_base 19: mod_base = OTHER; note = 2'-O-methylguanosine-3'-phosphate
  modified_base 20: mod_base = OTHER; note = 2'-O-methyladenosine-3'-phosphate
  modified_base 21: mod_base = OTHER; note = 2'-O-methyladenosine-3'-phosphorothioate
  modified_base 22: mod_base = OTHER; note = 2'-O-methylcytidine-3'-phosphorothioate
  modified_base 23: mod_base = OTHER; note = 2'-O-methyluridine
acagctgcctctagggatgaact

SEQ ID NO: 609 - RNA, 23 nt, synthetic construct
  source 1..23: mol_type = other RNA
agttcatccctagaggcagctgc

SEQ ID NO: 610 - RNA, 21 nt, synthetic construct
  source 1..21: mol_type = other RNA
  modified_base 1: mod_base = OTHER; note = 2'-O-methylcytidine-3'-phosphorothioate
  modified_base 2: mod_base = OTHER; note = 2'-O-methylguanosine-3'-phosphorothioate
  modified_base 3: mod_base = OTHER; note = 2'-O-methyladenosine-3'-phosphate
  modified_base 4: mod_base = OTHER; note = 2'-O-methylguanosine-3'-phosphate
  modified_base 5: mod_base = OTHER; note = 2'-O-methylcytidine-3'-phosphate
  modified_base 6: mod_base = OTHER; note = 2'-O-methyluridine-3'-phosphate
  modified_base 7: mod_base = OTHER; note = 2'-deoxy-2'-fluorocytidine-3'-phosphate
  modified_base 8: mod_base = OTHER; note = 2'-O-methylcytidine-3'-phosphate
  modified_base 9: mod_base = OTHER; note = 2'-deoxy-2'-fluorouridine-3'-phosphate
  modified_base 10: mod_base = OTHER; note = 2'-deoxy-2'-fluorouridine-3'-phosphate
  modified_base 11: mod_base = OTHER; note = 2'-deoxy-2'-fluoroguanosine-3'-phosphate
  modified_base 12: mod_base = OTHER; note = 2'-O-methylguanosine-3'-phosphate
  modified_base 13: mod_base = OTHER; note = 2'-O-methylguanosine-3'-phosphate
  modified_base 14: mod_base = OTHER; note = 2'-O-methyluridine-3'-phosphate
  modified_base 15: mod_base = OTHER; note = 2'-O-methylcytidine-3'-phosphate
  modified_base 16: mod_base = OTHER; note = 2'-O-methylcytidine-3'-phosphate
  modified_base 17: mod_base = OTHER; note = 2'-O-methyluridine-3'-phosphate
  modified_base 18: mod_base = OTHER; note = 2'-O-methylguanosine-3'-phosphate
  modified_base 19: mod_base = OTHER; note = 2'-O-methylcytidine-3'-phosphate
  modified_base 20: mod_base = OTHER; note = 2'-O-methyladenosine-3'-phosphate
  modified_base 21: mod_base = OTHER; note = 2'-O-methyluridine-3'-phosphate ((2S,4R)-1-[29-[[2-(acetylamino)-2-deoxy-beta-D-galactopyra nosyl]oxy]-14,14-bis[[3-[[3-[[5-[[2-(acetylamino)-2-deoxy-b eta-D-galactopyranosyl]oxy]-1-oxopentyl]amino]propyl]amino] -3-oxopropoxy]methyl]-1,12,19,25-tetraoxo-16-oxa-13,20,24-t riazanonacos-1-yl]-4-hydroxy-2-pyrrolidinyl)methyl ester
cgagctccttgggtcctgcat

SEQ ID NO: 611 - RNA, 23 nt, synthetic construct
  source 1..23: mol_type = other RNA
  modified_base 1: mod_base = OTHER; note = 2'-O-methyladenosine-3'-phosphorothioate
  modified_base 2: mod_base = OTHER; note = 2'-deoxy-2'-fluorouridine-3'-phosphorothioate
  modified_base 3: mod_base = OTHER; note = 2'-O-methylguanosine-3'-phosphate
  modified_base 4: mod_base = OTHER; note = 2'-O-methylcytidine-3'-phosphate
  modified_base 5: mod_base = OTHER; note = 2'-O-methyladenosine-3'-phosphate
  modified_base 6: mod_base = OTHER; note = 2'-deoxy-2'-fluoroguanosine-3'-phosphate
  modified_base 7: mod_base = OTHER; note = 2'-O-methylguanosine-3'-phosphate
  modified_base 8: mod_base = OTHER; note = 2'-deoxy-2'-fluoroadenosine-3'-phosphate
  modified_base 9: mod_base = OTHER; note = 2'-deoxy-2'-fluorocytidine-3'-phosphate
  modified_base 10: mod_base = OTHER; note = 2'-O-methylcytidine-3'-phosphate
  modified_base 11: mod_base = OTHER; note = 2'-O-methylcytidine-3'-phosphate
  modified_base 12: mod_base = OTHER; note = 2'-O-methyladenosine-3'-phosphate
  modified_base 13: mod_base = OTHER; note = 2'-O-methyladenosine-3'-phosphate
  modified_base 14: mod_base = OTHER; note = 2'-deoxy-2'-fluoroguanosine-3'-phosphate
  modified_base 15: mod_base = OTHER; note = 2'-O-methylguanosine-3'-phosphate
  modified_base 16: mod_base = OTHER; note = 2'-deoxy-2'-fluoroadenosine-3'-phosphate
  modified_base 17: mod_base = OTHER; note = 2'-O-methylguanosine-3'-phosphate
  modified_base 18: mod_base = OTHER; note = 2'-O-methylcytidine-3'-phosphate
  modified_base 19: mod_base = OTHER; note = 2'-O-methyluridine-3'-phosphate
  modified_base 20: mod_base = OTHER; note = 2'-O-methylcytidine-3'-phosphate
  modified_base 21: mod_base = OTHER; note = 2'-O-methylguanosine-3'-phosphorothioate
  modified_base 22: mod_base = OTHER; note = 2'-O-methylcytidine-3'-phosphorothioate
  modified_base 23: mod_base = OTHER; note = 2'-O-methyladenosine
atgcaggacccaaggagctcgca

SEQ ID NO: 612 - RNA, 23 nt, synthetic construct
  source 1..23: mol_type = other RNA
tgcgagctccttgggtcctgcaa

SEQ ID NO: 613 - RNA, 21 nt, synthetic construct
  source 1..21: mol_type = other RNA
  modified_base 1: mod_base = OTHER; note = 2'-O-methylguanosine-3'-phosphorothioate
  modified_base 2: mod_base = OTHER; note = 2'-O-methylguanosine-3'-phosphorothioate
  modified_base 3: mod_base = OTHER; note = 2'-O-methylcytidine-3'-phosphate
  modified_base 4: mod_base = OTHER; note = 2'-O-methyladenosine-3'-phosphate
  modified_base 5: mod_base = OTHER; note = 2'-O-methylguanosine-3'-phosphate
  modified_base 6: mod_base = OTHER; note = 2'-O-methylcytidine-3'-phosphate
  modified_base 7: mod_base = OTHER; note = 2'-deoxy-2'-fluorouridine-3'-phosphate
  modified_base 8: mod_base = OTHER; note = 2'-O-methylguanosine-3'-phosphate
  modified_base 9: mod_base = OTHER; note = 2'-deoxy-2'-fluorocytidine-3'-phosphate
  modified_base 10: mod_base = OTHER; note = 2'-deoxy-2'-fluorouridine-3'-phosphate
  modified_base 11: mod_base = OTHER; note = 2'-deoxy-2'-fluorocytidine-3'-phosphate
  modified_base 12: mod_base = OTHER; note = 2'-O-methylcytidine-3'-phosphate
  modified_base 13: mod_base = OTHER; note = 2'-O-methyladenosine-3'-phosphate
  modified_base 14: mod_base = OTHER; note = 2'-O-methylguanosine-3'-phosphate
  modified_base 15: mod_base = OTHER; note = 2'-O-methylguanosine-3'-phosphate
  modified_base 16: mod_base = OTHER; note = 2'-O-methyladenosine-3'-phosphate
  modified_base 17: mod_base = OTHER; note = 2'-O-methyladenosine-3'-phosphate
  modified_base 18: mod_base = OTHER; note = 2'-O-methylcytidine-3'-phosphate
  modified_base 19: mod_base = OTHER; note = 2'-O-methyladenosine-3'-phosphate
  modified_base 20: mod_base = OTHER; note = 2'-O-methylguanosine-3'-phosphate
  modified_base 21: mod_base = OTHER; note = 2'-O-methyluridine-3'-phosphate ((2S,4R)-1-[29-[[2-(acetylamino)-2-deoxy-beta-D-galactopyra nosyl]oxy]-14,14-bis[[3-[[3-[[5-[[2-(acetylamino)-2-deoxy-b eta-D-galactopyranosyl]oxy]-1-oxopentyl]amino]propyl]amino] -3-oxopropoxy]methyl]-1,12,19,25-tetraoxo-16-oxa-13,20,24-t riazanonacos-1-yl]-4-hydroxy-2-pyrrolidinyl)methyl ester
ggcagctgctccaggaacagt

SEQ ID NO: 614 - RNA, 23 nt, synthetic construct
  source 1..23: mol_type = other RNA
  modified_base 1: mod_base = OTHER; note = 2'-O-methyladenosine-3'-phosphorothioate
  modified_base 2: mod_base = OTHER; note = 2'-deoxy-2'-fluorocytidine-3'-phosphorothioate
  modified_base 3: mod_base = OTHER; note = 2'-O-methyluridine-3'-phosphate
  modified_base 4: mod_base = OTHER; note = 2'-O-methylguanosine-3'-phosphate
  modified_base 5: mod_base = OTHER; note = 2'-O-methyluridine-3'-phosphate
  modified_base 6: mod_base = OTHER; note = 2'-deoxy-2'-fluorouridine-3'-phosphate
  modified_base 7: mod_base = OTHER; note = 2'-O-methylcytidine-3'-phosphate
  modified_base 8: mod_base = OTHER; note = 2'-deoxy-2'-fluorocytidine-3'-phosphate
  modified_base 9: mod_base = OTHER; note = 2'-deoxy-2'-fluorouridine-3'-phosphate
  modified_base 10: mod_base = OTHER; note = 2'-O-methylguanosine-3'-phosphate
  modified_base 11: mod_base = OTHER; note = 2'-O-methylguanosine-3'-phosphate
  modified_base 12: mod_base = OTHER; note = 2'-O-methyladenosine-3'-phosphate
  modified_base 13: mod_base = OTHER; note = 2'-O-methylguanosine-3'-phosphate
  modified_base 14: mod_base = OTHER; note = 2'-deoxy-2'-fluorocytidine-3'-phosphate
  modified_base 15: mod_base = OTHER; note = 2'-O-methyladenosine-3'-phosphate
  modified_base 16: mod_base = OTHER; note = 2'-deoxy-2'-fluoroguanosine-3'-phosphate
  modified_base 17: mod_base = OTHER; note = 2'-O-methylcytidine-3'-phosphate
  modified_base 18: mod_base = OTHER; note = 2'-O-methyluridine-3'-phosphate
  modified_base 19: mod_base = OTHER; note = 2'-O-methylguanosine-3'-phosphate
  modified_base 20: mod_base = OTHER; note = 2'-O-methylcytidine-3'-phosphate
  modified_base 21: mod_base = OTHER; note = 2'-O-methylcytidine-3'-phosphorothioate
  modified_base 22: mod_base = OTHER; note = 2'-O-methyluridine-3'-phosphorothioate
  modified_base 23: mod_base = OTHER; note = 2'-O-methylcytidine
actgttcctggagcagctgcctc

SEQ ID NO: 615 - RNA, 23 nt, synthetic construct
  source 1..23: mol_type = other RNA
gaggcagctgctccaggaacaga

SEQ ID NO: 616 - RNA, 21 nt, synthetic construct
  source 1..21: mol_type = other RNA
  modified_base 1: mod_base = OTHER; note = 2'-O-methylcytidine-3'-phosphorothioate
  modified_base 2: mod_base = OTHER; note = 2'-O-methylcytidine-3'-phosphorothioate
  modified_base 3: mod_base = OTHER; note = 2'-O-methyladenosine-3'-phosphate
  modified_base 4: mod_base = OTHER; note = 2'-O-methyladenosine-3'-phosphate
  modified_base 5: mod_base = OTHER; note = 2'-O-methylguanosine-3'-phosphate
  modified_base 6: mod_base = OTHER; note = 2'-O-methyladenosine-3'-phosphate
  modified_base 7: mod_base = OTHER; note = 2'-deoxy-2'-fluorocytidine-3'-phosphate
  modified_base 8: mod_base = OTHER; note = 2'-O-methylcytidine-3'-phosphate
  modified_base 9: mod_base = OTHER; note = 2'-deoxy-2'-fluoroguanosine-3'-phosphate
  modified_base 10: mod_base = OTHER; note = 2'-deoxy-2'-fluorocytidine-3'-phosphate
  modified_base 11: mod_base = OTHER; note = 2'-deoxy-2'-fluorocytidine-3'-phosphate
  modified_base 12: mod_base = OTHER; note = 2'-O-methyladenosine-3'-phosphate
  modified_base 13: mod_base = OTHER; note = 2'-O-methyladenosine-3'-phosphate
  modified_base 14: mod_base = OTHER; note = 2'-O-methylguanosine-3'-phosphate
  modified_base 15: mod_base = OTHER; note = 2'-O-methylguanosine-3'-phosphate
  modified_base 16: mod_base = OTHER; note = 2'-O-methyladenosine-3'-phosphate
  modified_base 17: mod_base = OTHER; note = 2'-O-methyluridine-3'-phosphate
  modified_base 18: mod_base = OTHER; note = 2'-O-methylguanosine-3'-phosphate
  modified_base 19: mod_base = OTHER; note = 2'-O-methylcytidine-3'-phosphate
  modified_base 20: mod_base = OTHER; note = 2'-O-methyladenosine-3'-phosphate
  modified_base 21: mod_base = OTHER; note = 2'-O-methyluridine-3'-phosphate ((2S,4R)-1-[29-[[2-(acetylamino)-2-deoxy-beta-D-galactopyra nosyl]oxy]-14,14-bis[[3-[[3-[[5-[[2-(acetylamino)-2-deoxy-b eta-D-galactopyranosyl]oxy]-1-oxopentyl]amino]propyl]amino] -3-oxopropoxy]methyl]-1,12,19,25-tetraoxo-16-oxa-13,20,24-t riazanonacos-1-yl]-4-hydroxy-2-pyrrolidinyl)methyl ester
ccaagaccgccaaggatgcat

SEQ ID NO: 617 - RNA, 23 nt, synthetic construct
  source 1..23: mol_type = other RNA
  modified_base 1: mod_base = OTHER; note = 2'-O-methyladenosine-3'-phosphorothioate
  modified_base 2: mod_base = OTHER; note = 2'-deoxy-2'-fluorouridine-3'-phosphorothioate
  modified_base 3: mod_base = OTHER; note = 2'-O-methylguanosine-3'-phosphate
  modified_base 4: mod_base = OTHER; note = 2'-O-methylcytidine-3'-phosphate
  modified_base 5: mod_base = OTHER; note = 2'-O-methyladenosine-3'-phosphate
  modified_base 6: mod_base = OTHER; note = 2'-deoxy-2'-fluorouridine-3'-phosphate
  modified_base 7: mod_base = OTHER; note = 2'-O-methylcytidine-3'-phosphate
  modified_base 8: mod_base = OTHER; note = 2'-deoxy-2'-fluorocytidine-3'-phosphate
  modified_base 9: mod_base = OTHER; note = 2'-deoxy-2'-fluorouridine-3'-phosphate
  modified_base 10: mod_base = OTHER; note = 2'-O-methyluridine-3'-phosphate
  modified_base 11: mod_base = OTHER; note = 2'-O-methylguanosine-3'-phosphate
  modified_base 12: mod_base = OTHER; note = 2'-O-methylguanosine-3'-phosphate
  modified_base 13: mod_base = OTHER; note = 2'-O-methylcytidine-3'-phosphate
  modified_base 14: mod_base = OTHER; note = 2'-deoxy-2'-fluoroguanosine-3'-phosphate
  modified_base 15: mod_base = OTHER; note = 2'-O-methylguanosine-3'-phosphate
  modified_base 16: mod_base = OTHER; note = 2'-deoxy-2'-fluorouridine-3'-phosphate
  modified_base 17: mod_base = OTHER; note = 2'-O-methylcytidine-3'-phosphate
  modified_base 18: mod_base = OTHER; note = 2'-O-methyluridine-3'-phosphate
  modified_base 19: mod_base = OTHER; note = 2'-O-methyluridine-3'-phosphate
  modified_base 20: mod_base = OTHER; note = 2'-O-methylguanosine-3'-phosphate
  modified_base 21: mod_base = OTHER; note = 2'-O-methylguanosine-3'-phosphorothioate
  modified_base 22: mod_base = OTHER; note = 2'-O-methyluridine-3'-phosphorothioate
  modified_base 23: mod_base = OTHER; note = 2'-O-methylguanosine
atgcatccttggcggtcttggtg

SEQ ID NO: 618 - RNA, 23 nt, synthetic construct
  source 1..23: mol_type = other RNA
caccaagaccgccaaggatgcac

SEQ ID NO: 619 - RNA, 21 nt, synthetic construct
  source 1..21: mol_type = other RNA
  modified_base 1: mod_base = OTHER; note = 2'-O-methylguanosine-3'-phosphorothioate
  modified_base 2: mod_base = OTHER; note = 2'-O-methyladenosine-3'-phosphorothioate
  modified_base 3: mod_base = OTHER; note = 2'-O-methylcytidine-3'-phosphate
  modified_base 4: mod_base = OTHER; note = 2'-O-methyluridine-3'-phosphate
  modified_base 5: mod_base = OTHER; note = 2'-O-methyladenosine-3'-phosphate
  modified_base 6: mod_base = OTHER; note = 2'-O-methylcytidine-3'-phosphate
  modified_base 7: mod_base = OTHER; note = 2'-deoxy-2'-fluorouridine-3'-phosphate
  modified_base 8: mod_base = OTHER; note = 2'-O-methylguanosine-3'-phosphate
  modified_base 9: mod_base = OTHER; note = 2'-deoxy-2'-fluoroguanosine-3'-phosphate
  modified_base 10: mod_base = OTHER; note = 2'-deoxy-2'-fluoroadenosine-3'-phosphate
  modified_base 11: mod_base = OTHER; note = 2'-deoxy-2'-fluoroguanosine-3'-phosphate
  modified_base 12: mod_base = OTHER; note = 2'-O-methylcytidine-3'-phosphate
  modified_base 13: mod_base = OTHER; note = 2'-O-methyladenosine-3'-phosphate
  modified_base 14: mod_base = OTHER; note = 2'-O-methylcytidine-3'-phosphate
  modified_base 15: mod_base = OTHER; note = 2'-O-methylcytidine-3'-phosphate
  modified_base 16: mod_base = OTHER; note = 2'-O-methylguanosine-3'-phosphate
  modified_base 17: mod_base = OTHER; note = 2'-O-methyluridine-3'-phosphate
  modified_base 18: mod_base = OTHER; note = 2'-O-methyluridine-3'-phosphate
  modified_base 19: mod_base = OTHER; note = 2'-O-methyladenosine-3'-phosphate
  modified_base 20: mod_base = OTHER; note = 2'-O-methyladenosine-3'-phosphate
  modified_base 21: mod_base = OTHER; note = 2'-O-methyluridine-3'-phosphate ((2S,4R)-1-[29-[[2-(acetylamino)-2-deoxy-beta-D-galactopyra nosyl]oxy]-14,14-bis[[3-[[3-[[5-[[2-(acetylamino)-2-deoxy-b eta-D-galactopyranosyl]oxy]-1-oxopentyl]amino]propyl]amino] -3-oxopropoxy]methyl]-1,12,19,25-tetraoxo-16-oxa-13,20,24-t riazanonacos-1-yl]-4-hydroxy-2-pyrrolidinyl)methyl ester
gactactggagcaccgttaat

SEQ ID NO: 620 - RNA, 23 nt, synthetic construct
  source 1..23: mol_type = other RNA
  modified_base 1: mod_base = OTHER; note = 2'-O-methyladenosine-3'-phosphorothioate
  modified_base 2: mod_base = OTHER; note = 2'-deoxy-2'-fluorouridine-3'-phosphorothioate
  modified_base 3: mod_base = OTHER; note = 2'-O-methyluridine-3'-phosphate
  modified_base 4: mod_base = OTHER; note = 2'-O-methyladenosine-3'-phosphate
  modified_base 5: mod_base = OTHER; note = 2'-O-methyladenosine-3'-phosphate
  modified_base 6: mod_base = OTHER; note = 2'-deoxy-2'-fluorocytidine-3'-phosphate
  modified_base 7: mod_base = OTHER; note = 2'-O-methylguanosine-3'-phosphate
  modified_base 8: mod_base = OTHER; note = 2'-deoxy-2'-fluoroguanosine-3'-phosphate
  modified_base 9: mod_base = OTHER; note = 2'-deoxy-2'-fluorouridine-3'-phosphate
  modified_base 10: mod_base = OTHER; note = 2'-O-methylguanosine-3'-phosphate
  modified_base 11: mod_base = OTHER; note = 2'-O-methylcytidine-3'-phosphate
  modified_base 12: mod_base = OTHER; note = 2'-O-methyluridine-3'-phosphate
  modified_base 13: mod_base = OTHER; note = 2'-O-methylcytidine-3'-phosphate
  modified_base 14: mod_base = OTHER; note = 2'-deoxy-2'-fluorocytidine-3'-phosphate
  modified_base 15: mod_base = OTHER; note = 2'-O-methyladenosine-3'-phosphate
  modified_base 16: mod_base = OTHER; note = 2'-deoxy-2'-fluoroguanosine-3'-phosphate
  modified_base 17: mod_base = OTHER; note = 2'-O-methyluridine-3'-phosphate
  modified_base 18: mod_base = OTHER; note = 2'-O-methyladenosine-3'-phosphate
  modified_base 19: mod_base = OTHER; note = 2'-O-methylguanosine-3'-phosphate
  modified_base 20: mod_base = OTHER; note = 2'-O-methyluridine-3'-phosphate
  modified_base 21: mod_base = OTHER; note = 2'-O-methylcytidine-3'-phosphorothioate
  modified_base 22: mod_base = OTHER; note = 2'-O-methyluridine-3'-phosphorothioate
  modified_base 23: mod_base = OTHER; note = 2'-O-methyluridine
attaacggtgctccagtagtctt

SEQ ID NO: 621 - RNA, 23 nt, synthetic construct
  source 1..23: mol_type = other RNA
aagactactggagcaccgttaag

SEQ ID NO: 622 - RNA, 21 nt, synthetic construct
  source 1..21: mol_type = other RNA
  modified_base 1: mod_base = OTHER; note = 2'-O-methyladenosine-3'-phosphorothioate
  modified_base 2: mod_base = OTHER; note = 2'-O-methylguanosine-3'-phosphorothioate
  modified_base 3: mod_base = OTHER; note = 2'-O-methyluridine-3'-phosphate
  modified_base 4: mod_base = OTHER; note = 2'-O-methyluridine-3'-phosphate
  modified_base 5: mod_base = OTHER; note = 2'-O-methylcytidine-3'-phosphate
  modified_base 6: mod_base = OTHER; note = 2'-O-methyladenosine-3'-phosphate
  modified_base 7: mod_base = OTHER; note = 2'-deoxy-2'-fluorouridine-3'-phosphate
  modified_base 8: mod_base = OTHER; note = 2'-O-methylcytidine-3'-phosphate
  modified_base 9: mod_base = OTHER; note = 2'-deoxy-2'-fluorocytidine-3'-phosphate
  modified_base 10: mod_base = OTHER; note = 2'-deoxy-2'-fluorocytidine-3'-phosphate
  modified_base 11: mod_base = OTHER; note = 2'-deoxy-2'-fluorouridine-3'-phosphate
  modified_base 12: mod_base = OTHER; note = 2'-O-methyladenosine-3'-phosphate
  modified_base 13: mod_base = OTHER; note = 2'-O-methylguanosine-3'-phosphate
  modified_base 14: mod_base = OTHER; note = 2'-O-methyladenosine-3'-phosphate
  modified_base 15: mod_base = OTHER; note = 2'-O-methylguanosine-3'-phosphate
  modified_base 16: mod_base = OTHER; note = 2'-O-methylguanosine-3'-phosphate
  modified_base 17: mod_base = OTHER; note = 2'-O-methylcytidine-3'-phosphate
  modified_base 18: mod_base = OTHER; note = 2'-O-methyladenosine-3'-phosphate
  modified_base 19: mod_base = OTHER; note = 2'-O-methylguanosine-3'-phosphate
  modified_base 20: mod_base = OTHER; note = 2'-O-methylcytidine-3'-phosphate
  modified_base 21: mod_base = OTHER; note = 2'-O-methyluridine-3'-phosphate ((2S,4R)-1-[29-[[2-(acetylamino)-2-deoxy-beta-D-galactopyra nosyl]oxy]-14,14-bis[[3-[[3-[[5-[[2-(acetylamino)-2-deoxy-b eta-D-galactopyranosyl]oxy]-1-oxopentyl]amino]propyl]amino] -3-oxopropoxy]methyl]-1,12,19,25-tetraoxo-16-oxa-13,20,24-t riazanonacos-1-yl]-4-hydroxy-2-pyrrolidinyl)methyl ester
agttcatccctagaggcagct

SEQ ID NO: 623 - RNA, 23 nt, synthetic construct
  source 1..23: mol_type = other RNA
  modified_base 1: mod_base = OTHER; note = 2'-O-methyladenosine-3'-phosphorothioate
  modified_base 2: mod_base = OTHER; note = 2'-deoxy-2'-fluoroguanosine-3'-phosphorothioate
  modified_base 3: mod_base = OTHER; note = 2'-O-methylcytidine-3'-phosphate
  modified_base 4: mod_base = OTHER; note = 2'-O-methyluridine-3'-phosphate
  modified_base 5: mod_base = OTHER; note = 2'-O-methylguanosine-3'-phosphate
  modified_base 6: mod_base = OTHER; note = 2'-deoxy-2'-fluorocytidine-3'-phosphate
  modified_base 7: mod_base = OTHER; note = 2'-O-methylcytidine-3'-phosphate
  modified_base 8: mod_base = OTHER; note = 2'-deoxy-2'-fluorouridine-3'-phosphate
  modified_base 9: mod_base = OTHER; note = 2'-deoxy-2'-fluorocytidine-3'-phosphate
  modified_base 10: mod_base = OTHER; note = 2'-O-methyluridine-3'-phosphate
  modified_base 11: mod_base = OTHER; note = 2'-O-methyladenosine-3'-phosphate
  modified_base 12: mod_base = OTHER; note = 2'-O-methylguanosine-3'-phosphate
  modified_base 13: mod_base = OTHER; note = 2'-O-methylguanosine-3'-phosphate
  modified_base 14: mod_base = OTHER; note = 2'-deoxy-2'-fluoroguanosine-3'-phosphate
  modified_base 15: mod_base = OTHER; note = 2'-O-methyladenosine-3'-phosphate
  modified_base 16: mod_base = OTHER; note = 2'-deoxy-2'-fluorouridine-3'-phosphate
  modified_base 17: mod_base = OTHER; note = 2'-O-methylguanosine-3'-phosphate
  modified_base 18: mod_base = OTHER; note = 2'-O-methyladenosine-3'-phosphate
  modified_base 19: mod_base = OTHER; note = 2'-O-methyladenosine-3'-phosphate
  modified_base 20: mod_base = OTHER; note = 2'-O-methylcytidine-3'-phosphate
  modified_base 21: mod_base = OTHER; note = 2'-O-methyluridine-3'-phosphorothioate
  modified_base 22: mod_base = OTHER; note = 2'-O-methylguanosine-3'-phosphorothioate
  modified_base 23: mod_base = OTHER; note = 2'-O-methyladenosine
agctgcctctagggatgaactga

SEQ ID NO: 624 - RNA, 23 nt, synthetic construct
  source 1..23: mol_type = other RNA
tcagttcatccctagaggcagct

SEQ ID NO: 625 - RNA, 21 nt, synthetic construct
  source 1..21: mol_type = other RNA
  modified_base 1: mod_base = OTHER; note = 2'-O-methyladenosine-3'-phosphorothioate
  modified_base 2: mod_base = OTHER; note = 2'-O-methylcytidine-3'-phosphorothioate
  modified_base 3: mod_base = OTHER; note = 2'-O-methyluridine-3'-phosphate
  modified_base 4: mod_base = OTHER; note = 2'-O-methylguanosine-3'-phosphate
  modified_base 5: mod_base = OTHER; note = 2'-O-methylguanosine-3'-phosphate
  modified_base 6: mod_base = OTHER; note = 2'-O-methyladenosine-3'-phosphate
  modified_base 7: mod_base = OTHER; note = 2'-deoxy-2'-fluoroguanosine-3'-phosphate
  modified_base 8: mod_base = OTHER; note = 2'-O-methylcytidine-3'-phosphate
  modified_base 9: mod_base = OTHER; note = 2'-deoxy-2'-fluoroadenosine-3'-phosphate
  modified_base 10: mod_base = OTHER; note = 2'-deoxy-2'-fluorocytidine-3'-phosphate
  modified_base 11: mod_base = OTHER; note = 2'-deoxy-2'-fluorocytidine-3'-phosphate
  modified_base 12: mod_base = OTHER; note = 2'-O-methylguanosine-3'-phosphate
  modified_base 13: mod_base = OTHER; note = 2'-O-methyluridine-3'-phosphate
  modified_base 14: mod_base = OTHER; note = 2'-O-methyluridine-3'-phosphate
  modified_base 15: mod_base = OTHER; note = 2'-O-methyladenosine-3'-phosphate
  modified_base 16: mod_base = OTHER; note = 2'-O-methyladenosine-3'-phosphate
  modified_base 17: mod_base = OTHER; note = 2'-O-methylguanosine-3'-phosphate
  modified_base 18: mod_base = OTHER; note = 2'-O-methylguanosine-3'-phosphate
  modified_base 19: mod_base = OTHER; note = 2'-O-methyladenosine-3'-phosphate
  modified_base 20: mod_base = OTHER; note = 2'-O-methylcytidine-3'-phosphate
  modified_base 21: mod_base = OTHER; note = 2'-O-methyluridine-3'-phosphate ((2S,4R)-1-[29-[[2-(acetylamino)-2-deoxy-beta-D-galactopyra nosyl]oxy]-14,14-bis[[3-[[3-[[5-[[2-(acetylamino)-2-deoxy-b eta-D-galactopyranosyl]oxy]-1-oxopentyl]amino]propyl]amino] -3-oxopropoxy]methyl]-1,12,19,25-tetraoxo-16-oxa-13,20,24-t riazanonacos-1-yl]-4-hydroxy-2-pyrrolidinyl)methyl ester
actggagcaccgttaaggact

SEQ ID NO: 626 - RNA, 23 nt, synthetic construct
  source 1..23: mol_type = other RNA
  modified_base 1: mod_base = OTHER; note = 2'-O-methyladenosine-3'-phosphorothioate
  modified_base 2: mod_base = OTHER; note = 2'-deoxy-2'-fluoroguanosine-3'-phosphorothioate
  modified_base 3: mod_base = OTHER; note = 2'-O-methyluridine-3'-phosphate
  modified_base 4: mod_base = OTHER; note = 2'-O-methylcytidine-3'-phosphate
  modified_base 5: mod_base = OTHER; note = 2'-O-methylcytidine-3'-phosphate
  modified_base 6: mod_base = OTHER; note = 2'-deoxy-2'-fluorouridine-3'-phosphate
  modified_base 7: mod_base = OTHER; note = 2'-O-methyluridine-3'-phosphate
  modified_base 8: mod_base = OTHER; note = 2'-deoxy-2'-fluoroadenosine-3'-phosphate
  modified_base 9: mod_base = OTHER; note = 2'-deoxy-2'-fluoroadenosine-3'-phosphate
  modified_base 10: mod_base = OTHER; note = 2'-O-methylcytidine-3'-phosphate
  modified_base 11: mod_base = OTHER; note = 2'-O-methylguanosine-3'-phosphate
  modified_base 12: mod_base = OTHER; note = 2'-O-methylguanosine-3'-phosphate
  modified_base 13: mod_base = OTHER; note = 2'-O-methyluridine-3'-phosphate
  modified_base 14: mod_base = OTHER; note = 2'-deoxy-2'-fluoroguanosine-3'-phosphate
  modified_base 15: mod_base = OTHER; note = 2'-O-methylcytidine-3'-phosphate
  modified_base 16: mod_base = OTHER; note = 2'-deoxy-2'-fluorouridine-3'-phosphate
  modified_base 17: mod_base = OTHER; note = 2'-O-methylcytidine-3'-phosphate
  modified_base 18: mod_base = OTHER; note = 2'-O-methylcytidine-3'-phosphate
  modified_base 19: mod_base = OTHER; note = 2'-O-methyladenosine-3'-phosphate
  modified_base 20: mod_base = OTHER; note = 2'-O-methylguanosine-3'-phosphate
  modified_base 21: mod_base = OTHER; note = 2'-O-methyluridine-3'-phosphorothioate
  modified_base 22: mod_base = OTHER; note = 2'-O-methyladenosine-3'-phosphorothioate
  modified_base 23: mod_base = OTHER; note = 2'-O-methylguanosine
agtccttaacggtgctccagtag

SEQ ID NO: 627 - RNA, 23 nt, synthetic construct
  source 1..23: mol_type = other RNA
ctactggagcaccgttaaggaca

SEQ ID NO: 628 - RNA, 21 nt, synthetic construct
  source 1..21: mol_type = other RNA
  modified_base 1: mod_base = OTHER; note = 2'-O-methyluridine-3'-phosphorothioate
  modified_base 2: mod_base = OTHER; note = 2'-O-methylguanosine-3'-phosphorothioate
  modified_base 3: mod_base = OTHER; note = 2'-O-methylguanosine-3'-phosphate
  modified_base 4: mod_base = OTHER; note = 2'-O-methylguanosine-3'-phosphate
  modified_base 5: mod_base = OTHER; note = 2'-O-methyluridine-3'-phosphate
  modified_base 6: mod_base = OTHER; note = 2'-O-methylguanosine-3'-phosphate
  modified_base 7: mod_base = OTHER; note = 2'-deoxy-2'-fluoroadenosine-3'-phosphate
  modified_base 8: mod_base = OTHER; note = 2'-O-methylcytidine-3'-phosphate
  modified_base 9: mod_base = OTHER; note = 2'-deoxy-2'-fluorocytidine-3'-phosphate
  modified_base 10: mod_base = OTHER; note = 2'-deoxy-2'-fluoroguanosine-3'-phosphate
  modified_base 11: mod_base = OTHER; note = 2'-deoxy-2'-fluoroadenosine-3'-phosphate
  modified_base 12: mod_base = OTHER; note = 2'-O-methyluridine-3'-phosphate
  modified_base 13: mod_base = OTHER; note = 2'-O-methylguanosine-3'-phosphate
  modified_base 14: mod_base = OTHER; note = 2'-O-methylguanosine-3'-phosphate
  modified_base 15: mod_base = OTHER; note = 2'-O-methylcytidine-3'-phosphate
  modified_base 16: mod_base = OTHER; note = 2'-O-methyluridine-3'-phosphate
  modified_base 17: mod_base = OTHER; note = 2'-O-methyluridine-3'-phosphate
  modified_base 18: mod_base = OTHER; note = 2'-O-methylcytidine-3'-phosphate
  modified_base 19: mod_base = OTHER; note = 2'-O-methyladenosine-3'-phosphate
  modified_base 20: mod_base = OTHER; note = 2'-O-methylguanosine-3'-phosphate
  modified_base 21: mod_base = OTHER; note = 2'-O-methyluridine-3'-phosphate ((2S,4R)-1-[29-[[2-(acetylamino)-2-deoxy-beta-D-galactopyra nosyl]oxy]-14,14-bis[[3-[[3-[[5-[[2-(acetylamino)-2-deoxy-b eta-D-galactopyranosyl]oxy]-1-oxopentyl]amino]propyl]amino] -3-oxopropoxy]methyl]-1,12,19,25-tetraoxo-16-oxa-13,20,24-t riazanonacos-1-yl]-4-hydroxy-2-pyrrolidinyl)methyl ester
tgggtgaccgatggcttcagt

SEQ ID NO: 629 - RNA, 23 nt, synthetic construct
  source 1..23: mol_type = other RNA
  modified_base 1: mod_base = OTHER; note = 2'-O-methyladenosine-3'-phosphorothioate
  modified_base 2: mod_base = OTHER; note = 2'-deoxy-2'-fluorocytidine-3'-phosphorothioate
  modified_base 3: mod_base = OTHER; note = 2'-O-methyluridine-3'-phosphate
  modified_base 4: mod_base = OTHER; note = 2'-O-methylguanosine-3'-phosphate
  modified_base 5: mod_base = OTHER; note = 2'-O-methyladenosine-3'-phosphate
  modified_base 6: mod_base = OTHER; note = 2'-deoxy-2'-fluoroadenosine-3'-phosphate
  modified_base 7: mod_base = OTHER; note = 2'-O-methylguanosine-3'-phosphate
  modified_base 8: mod_base = OTHER; note = 2'-deoxy-2'-fluorocytidine-3'-phosphate
  modified_base 9: mod_base = OTHER; note = 2'-deoxy-2'-fluorocytidine-3'-phosphate
  modified_base 10: mod_base = OTHER; note = 2'-O-methyladenosine-3'-phosphate
  modified_base 11: mod_base = OTHER; note = 2'-O-methyluridine-3'-phosphate
  modified_base 12: mod_base = OTHER; note = 2'-O-methylcytidine-3'-phosphate
  modified_base 13: mod_base = OTHER; note = 2'-O-methylguanosine-3'-phosphate
  modified_base 14: mod_base = OTHER; note = 2'-deoxy-2'-fluoroguanosine-3'-phosphate
  modified_base 15: mod_base = OTHER; note = 2'-O-methyluridine-3'-phosphate
  modified_base 16: mod_base = OTHER; note = 2'-deoxy-2'-fluorocytidine-3'-phosphate
  modified_base 17: mod_base = OTHER; note = 2'-O-methyladenosine-3'-phosphate
  modified_base 18: mod_base = OTHER; note = 2'-O-methylcytidine-3'-phosphate
  modified_base 19: mod_base = OTHER; note = 2'-O-methylcytidine-3'-phosphate
  modified_base 20: mod_base = OTHER; note = 2'-O-methylcytidine-3'-phosphate
  modified_base 21: mod_base = OTHER; note = 2'-O-methyladenosine-3'-phosphorothioate
  modified_base 22: mod_base = OTHER; note = 2'-O-methylguanosine-3'-phosphorothioate
  modified_base 23: mod_base = OTHER; note = 2'-O-methylcytidine
actgaagccatcggtcacccagc

SEQ ID NO: 630 - RNA, 23 nt, synthetic construct
  source 1..23: mol_type = other RNA
gctgggtgaccgatggcttcagt

SEQ ID NO: 631 - RNA, 21 nt, synthetic construct
  source 1..21: mol_type = other RNA
  modified_base 1: mod_base = OTHER; note = 2'-O-methylcytidine-3'-phosphorothioate
  modified_base 2: mod_base = OTHER; note = 2'-O-methylcytidine-3'-phosphorothioate
  modified_base 3: mod_base = OTHER; note = 2'-O-methylguanosine-3'-phosphate
  modified_base 4: mod_base = OTHER; note = 2'-O-methyladenosine-3'-phosphate
  modified_base 5: mod_base = OTHER; note = 2'-O-methylguanosine-3'-phosphate
  modified_base 6: mod_base = OTHER; note = 2'-O-methylcytidine-3'-phosphate
  modified_base 7: mod_base = OTHER; note = 2'-deoxy-2'-fluorouridine-3'-phosphate
  modified_base 8: mod_base = OTHER; note = 2'-O-methyluridine-3'-phosphate
  modified_base 9: mod_base = OTHER; note = 2'-deoxy-2'-fluorocytidine-3'-phosphate
  modified_base 10: mod_base = OTHER; note = 2'-deoxy-2'-fluoroadenosine-3'-phosphate
  modified_base 11: mod_base = OTHER; note = 2'-deoxy-2'-fluoroguanosine-3'-phosphate
  modified_base 12: mod_base = OTHER; note = 2'-O-methyladenosine-3'-phosphate
  modified_base 13: mod_base = OTHER; note = 2'-O-methylguanosine-3'-phosphate
  modified_base 14: mod_base = OTHER; note = 2'-O-methylguanosine-3'-phosphate
  modified_base 15: mod_base = OTHER; note = 2'-O-methylcytidine-3'-phosphate
  modified_base 16: mod_base = OTHER; note = 2'-O-methylcytidine-3'-phosphate
  modified_base 17: mod_base = OTHER; note = 2'-O-methylguanosine-3'-phosphate
  modified_base 18: mod_base = OTHER; note = 2'-O-methyladenosine-3'-phosphate
  modified_base 19: mod_base = OTHER; note = 2'-O-methylguanosine-3'-phosphate
  modified_base 20: mod_base = OTHER; note = 2'-O-methylguanosine-3'-phosphate
  modified_base 21: mod_base = OTHER; note = 2'-O-methyluridine-3'-phosphate ((2S,4R)-1-[29-[[2-(acetylamino)-2-deoxy-beta-D-galactopyra nosyl]oxy]-14,14-bis[[3-[[3-[[5-[[2-(acetylamino)-2-deoxy-b eta-D-galactopyranosyl]oxy]-1-oxopentyl]amino]propyl]amino] -3-oxopropoxy]methyl]-1,12,19,25-tetraoxo-16-oxa-13,20,24-t riazanonacos-1-yl]-4-hydroxy-2-pyrrolidinyl)methyl ester
ccgagcttcagaggccgaggt

SEQ ID NO: 632 - RNA, 23 nt, synthetic construct
  source 1..23: mol_type = other RNA
  modified_base 1: mod_base = OTHER; note = 2'-O-methyladenosine-3'-phosphorothioate
  modified_base 2: mod_base = OTHER; note = 2'-deoxy-2'-fluorocytidine-3'-phosphorothioate
  modified_base 3: mod_base = OTHER; note = 2'-O-methylcytidine-3'-phosphate
  modified_base 4: mod_base = OTHER; note = 2'-O-methyluridine-3'-phosphate
  modified_base 5: mod_base = OTHER; note = 2'-O-methylcytidine-3'-phosphate
  modified_base 6: mod_base = OTHER; note = 2'-deoxy-2'-fluoroguanosine-3'-phosphate
  modified_base 7: mod_base = OTHER; note = 2'-O-methylguanosine-3'-phosphate
  modified_base 8: mod_base = OTHER; note = 2'-deoxy-2'-fluorocytidine-3'-phosphate
  modified_base 9: mod_base = OTHER; note = 2'-deoxy-2'-fluorocytidine-3'-phosphate
  modified_base 10: mod_base = OTHER; note = 2'-O-methyluridine-3'-phosphate
  modified_base 11: mod_base = OTHER; note = 2'-O-methylcytidine-3'-phosphate
  modified_base 12: mod_base = OTHER; note = 2'-O-methyluridine-3'-phosphate
  modified_base 13: mod_base = OTHER; note = 2'-O-methylguanosine-3'-phosphate
  modified_base 14: mod_base = OTHER; note = 2'-deoxy-2'-fluoroadenosine-3'-phosphate
  modified_base 15: mod_base = OTHER; note = 2'-O-methyladenosine-3'-phosphate
  modified_base 16: mod_base = OTHER; note = 2'-deoxy-2'-fluoroguanosine-3'-phosphate
  modified_base 17: mod_base = OTHER; note = 2'-O-methylcytidine-3'-phosphate
  modified_base 18: mod_base = OTHER; note = 2'-O-methyluridine-3'-phosphate
  modified_base 19: mod_base = OTHER; note = 2'-O-methylcytidine-3'-phosphate
  modified_base 20: mod_base = OTHER; note = 2'-O-methylguanosine-3'-phosphate
  modified_base 21: mod_base = OTHER; note = 2'-O-methylguanosine-3'-phosphorothioate
  modified_base 22: mod_base = OTHER; note = 2'-O-methylguanosine-3'-phosphorothioate
  modified_base 23: mod_base = OTHER; note = 2'-O-methylcytidine
acctcggcctctgaagctcgggc

SEQ ID NO: 633 - RNA, 23 nt, synthetic construct
  source 1..23: mol_type = other RNA
gcccgagcttcagaggccgagga

SEQ ID NO: 634 - RNA, 21 nt, synthetic construct
  source 1..21: mol_type = other RNA
  modified_base 1: mod_base = OTHER; note = 2'-O-methyladenosine-3'-phosphorothioate
  modified_base 2: mod_base = OTHER; note = 2'-O-methylcytidine-3'-phosphorothioate
  modified_base 3: mod_base = OTHER; note = 2'-O-methylcytidine-3'-phosphate
  modified_base 4: mod_base = OTHER; note = 2'-O-methyladenosine-3'-phosphate
  modified_base 5: mod_base = OTHER; note = 2'-O-methyladenosine-3'-phosphate
  modified_base 6: mod_base = OTHER; note = 2'-O-methylguanosine-3'-phosphate
  modified_base 7: mod_base = OTHER; note = 2'-deoxy-2'-fluoroadenosine-3'-phosphate
  modified_base 8: mod_base = OTHER; note = 2'-O-methylcytidine-3'-phosphate
  modified_base 9: mod_base = OTHER; note = 2'-deoxy-2'-fluorocytidine-3'-phosphate
  modified_base 10: mod_base = OTHER; note = 2'-deoxy-2'-fluoroguanosine-3'-phosphate
  modified_base 11: mod_base = OTHER; note = 2'-deoxy-2'-fluorocytidine-3'-phosphate
  modified_base 12: mod_base = OTHER; note = 2'-O-methylcytidine-3'-phosphate
  modified_base 13: mod_base = OTHER; note = 2'-O-methyladenosine-3'-phosphate
  modified_base 14: mod_base = OTHER; note = 2'-O-methyladenosine-3'-phosphate
  modified_base 15: mod_base = OTHER; note = 2'-O-methylguanosine-3'-phosphate
  modified_base 16: mod_base = OTHER; note = 2'-O-methylguanosine-3'-phosphate
  modified_base 17: mod_base = OTHER; note = 2'-O-methyladenosine-3'-phosphate
  modified_base 18: mod_base = OTHER; note = 2'-O-methyluridine-3'-phosphate
  modified_base 19: mod_base = OTHER; note = 2'-O-methylguanosine-3'-phosphate
  modified_base 20: mod_base = OTHER; note = 2'-O-methylcytidine-3'-phosphate
  modified_base 21: mod_base = OTHER; note = 2'-O-methyluridine-3'-phosphate ((2S,4R)-1-[29-[[2-(acetylamino)-2-deoxy-beta-D-galactopyra nosyl]oxy]-14,14-bis[[3-[[3-[[5-[[2-(acetylamino)-2-deoxy-b eta-D-galactopyranosyl]oxy]-1-oxopentyl]amino]propyl]amino] -3-oxopropoxy]methyl]-1,12,19,25-tetraoxo-16-oxa-13,20,24-t riazanonacos-1-yl]-4-hydroxy-2-pyrrolidinyl)methyl ester
accaagaccgccaaggatgct

SEQ ID NO: 635 - RNA, 23 nt, synthetic construct
  source 1..23: mol_type = other RNA
  modified_base 1: mod_base = OTHER; note = 2'-O-methyladenosine-3'-phosphorothioate
  modified_base 2: mod_base = OTHER; note = 2'-deoxy-2'-fluoroguanosine-3'-phosphorothioate
  modified_base 3: mod_base = OTHER; note = 2'-O-methylcytidine-3'-phosphate
  modified_base 4: mod_base = OTHER; note = 2'-O-methyladenosine-3'-phosphate
  modified_base 5: mod_base = OTHER; note = 2'-O-methyluridine-3'-phosphate
  modified_base 6: mod_base = OTHER; note = 2'-deoxy-2'-fluorocytidine-3'-phosphate
  modified_base 7: mod_base = OTHER; note = 2'-O-methylcytidine-3'-phosphate
  modified_base 8: mod_base = OTHER; note = 2'-deoxy-2'-fluorouridine-3'-phosphate
  modified_base 9: mod_base = OTHER; note = 2'-deoxy-2'-fluorouridine-3'-phosphate
  modified_base 10: mod_base = OTHER; note = 2'-O-methylguanosine-3'-phosphate
  modified_base 11: mod_base = OTHER; note = 2'-O-methylguanosine-3'-phosphate
  modified_base 12: mod_base = OTHER; note = 2'-O-methylcytidine-3'-phosphate
  modified_base 13: mod_base = OTHER; note = 2'-O-methylguanosine-3'-phosphate
  modified_base 14: mod_base = OTHER; note = 2'-deoxy-2'-fluoroguanosine-3'-phosphate
  modified_base 15: mod_base = OTHER; note = 2'-O-methyluridine-3'-phosphate
  modified_base 16: mod_base = OTHER; note = 2'-deoxy-2'-fluorocytidine-3'-phosphate
  modified_base 17: mod_base = OTHER; note = 2'-O-methyluridine-3'-phosphate
  modified_base 18: mod_base = OTHER; note = 2'-O-methyluridine-3'-phosphate
  modified_base 19: mod_base = OTHER; note = 2'-O-methylguanosine-3'-phosphate
  modified_base 20: mod_base = OTHER; note = 2'-O-methylguanosine-3'-phosphate
  modified_base 21: mod_base = OTHER; note = 2'-O-methyluridine-3'-phosphorothioate
  modified_base 22: mod_base = OTHER; note = 2'-O-methylguanosine-3'-phosphorothioate
  modified_base 23: mod_base = OTHER; note = 2'-O-methylguanosine
agcatccttggcggtcttggtgg

SEQ ID NO: 636 - RNA, 23 nt, synthetic construct
  source 1..23: mol_type = other RNA
ccaccaagaccgccaaggatgca

SEQ ID NO: 637 - RNA, 21 nt, synthetic construct
  source 1..21: mol_type = other RNA
  modified_base 1: mod_base = OTHER; note = 2'-O-methyluridine-3'-phosphorothioate
  modified_base 2: mod_base = OTHER; note = 2'-O-methyladenosine-3'-phosphorothioate
  modified_base 3: mod_base = OTHER; note = 2'-O-methylguanosine-3'-phosphate
  modified_base 4: mod_base = OTHER; note = 2'-O-methyladenosine-3'-phosphate
  modified_base 5: mod_base = OTHER; note = 2'-O-methylguanosine-3'-phosphate
  modified_base 6: mod_base = OTHER; note = 2'-O-methylguanosine-3'-phosphate
  modified_base 7: mod_base = OTHER; note = 2'-deoxy-2'-fluorocytidine-3'-phosphate
  modified_base 8: mod_base = OTHER; note = 2'-O-methyladenosine-3'-phosphate
  modified_base 9: mod_base = OTHER; note = 2'-deoxy-2'-fluoroguanosine-3'-phosphate
  modified_base 10: mod_base = OTHER; note = 2'-deoxy-2'-fluorocytidine-3'-phosphate
  modified_base 11: mod_base = OTHER; note = 2'-deoxy-2'-fluorouridine-3'-phosphate
  modified_base 12: mod_base = OTHER; note = 2'-O-methylguanosine-3'-phosphate
  modified_base 13: mod_base = OTHER; note = 2'-O-methylcytidine-3'-phosphate
  modified_base 14: mod_base = OTHER; note = 2'-O-methyluridine-3'-phosphate
  modified_base 15: mod_base = OTHER; note = 2'-O-methylcytidine-3'-phosphate
  modified_base 16: mod_base = OTHER; note = 2'-O-methylcytidine-3'-phosphate
  modified_base 17: mod_base = OTHER; note = 2'-O-methyladenosine-3'-phosphate
  modified_base 18: mod_base = OTHER; note = 2'-O-methylguanosine-3'-phosphate
  modified_base 19: mod_base = OTHER; note = 2'-O-methylguanosine-3'-phosphate
  modified_base 20: mod_base = OTHER; note = 2'-O-methyladenosine-3'-phosphate
  modified_base 21: mod_base = OTHER; note = 2'-O-methyluridine-3'-phosphate ((2S,4R)-1-[29-[[2-(acetylamino)-2-deoxy-beta-D-galactopyra nosyl]oxy]-14,14-bis[[3-[[3-[[5-[[2-(acetylamino)-2-deoxy-b eta-D-galactopyranosyl]oxy]-1-oxopentyl]amino]propyl]amino] -3-oxopropoxy]methyl]-1,12,19,25-tetraoxo-16-oxa-13,20,24-t riazanonacos-1-yl]-4-hydroxy-2-pyrrolidinyl)methyl ester
tagaggcagctgctccaggat

SEQ ID NO: 638 - RNA, 23 nt, synthetic construct
  source 1..23: mol_type = other RNA
  modified_base 1: mod_base = OTHER; note = 2'-O-methyladenosine-3'-phosphorothioate
  modified_base 2: mod_base = OTHER; note = 2'-deoxy-2'-fluorouridine-3'-phosphorothioate
  modified_base 3: mod_base = OTHER; note = 2'-O-methylcytidine-3'-phosphate
  modified_base 4: mod_base = OTHER; note = 2'-O-methylcytidine-3'-phosphate
  modified_base 5: mod_base = OTHER; note = 2'-O-methyluridine-3'-phosphate
  modified_base 6: mod_base = OTHER; note = 2'-deoxy-2'-fluoroguanosine-3'-phosphate
  modified_base 7: mod_base = OTHER; note = 2'-O-methylguanosine-3'-phosphate
  modified_base 8: mod_base = OTHER; note = 2'-deoxy-2'-fluoroadenosine-3'-phosphate
  modified_base 9: mod_base = OTHER; note = 2'-deoxy-2'-fluoroguanosine-3'-phosphate
  modified_base 10: mod_base = OTHER; note = 2'-O-methylcytidine-3'-phosphate
  modified_base 11: mod_base = OTHER; note = 2'-O-methyladenosine-3'-phosphate
  modified_base 12: mod_base = OTHER; note = 2'-O-methylguanosine-3'-phosphate
  modified_base 13: mod_base = OTHER; note = 2'-O-methylcytidine-3'-phosphate
  modified_base 14: mod_base = OTHER; note = 2'-deoxy-2'-fluorouridine-3'-phosphate
  modified_base 15: mod_base = OTHER; note = 2'-O-methylguanosine-3'-phosphate
  modified_base 16: mod_base = OTHER; note = 2'-deoxy-2'-fluorocytidine-3'-phosphate
  modified_base 17: mod_base = OTHER; note = 2'-O-methylcytidine-3'-phosphate
  modified_base 18: mod_base = OTHER; note = 2'-O-methyluridine-3'-phosphate
  modified_base 19: mod_base = OTHER; note = 2'-O-methylcytidine-3'-phosphate
  modified_base 20: mod_base = OTHER; note = 2'-O-methyluridine-3'-phosphate
  modified_base 21: mod_base = OTHER; note = 2'-O-methyladenosine-3'-phosphorothioate
  modified_base 22: mod_base = OTHER; note = 2'-O-methylguanosine-3'-phosphorothioate
  modified_base 23: mod_base = OTHER; note = 2'-O-methylguanosine
atcctggagcagctgcctctagg

SEQ ID NO: 639 - RNA, 23 nt, synthetic construct
  source 1..23: mol_type = other RNA
cctagaggcagctgctccaggaa

SEQ ID NO: 640 - RNA, 21 nt, synthetic construct
  source 1..21: mol_type = other RNA
  modified_base 1: mod_base = OTHER; note = 2'-O-methylguanosine-3'-phosphorothioate
  modified_base 2: mod_base = OTHER; note = 2'-O-methylguanosine-3'-phosphorothioate
  modified_base 3: mod_base = OTHER; note = 2'-O-methylguanosine-3'-phosphate
  modified_base 4: mod_base = OTHER; note = 2'-O-methyluridine-3'-phosphate
  modified_base 5: mod_base = OTHER; note = 2'-O-methylguanosine-3'-phosphate
  modified_base 6: mod_base = OTHER; note = 2'-O-methyladenosine-3'-phosphate
  modified_base 7: mod_base = OTHER; note = 2'-deoxy-2'-fluorocytidine-3'-phosphate
  modified_base 8: mod_base = OTHER; note = 2'-O-methylcytidine-3'-phosphate
  modified_base 9: mod_base = OTHER; note = 2'-deoxy-2'-fluoroguanosine-3'-phosphate
  modified_base 10: mod_base = OTHER; note = 2'-deoxy-2'-fluoroadenosine-3'-phosphate
  modified_base 11: mod_base = OTHER; note = 2'-deoxy-2'-fluorouridine-3'-phosphate
  modified_base 12: mod_base = OTHER; note = 2'-O-methylguanosine-3'-phosphate
  modified_base 13: mod_base = OTHER; note = 2'-O-methylguanosine-3'-phosphate
  modified_base 14: mod_base = OTHER; note = 2'-O-methylcytidine-3'-phosphate
  modified_base 15: mod_base = OTHER; note = 2'-O-methyluridine-3'-phosphate
  modified_base 16: mod_base = OTHER; note = 2'-O-methyluridine-3'-phosphate
  modified_base 17: mod_base = OTHER; note = 2'-O-methylcytidine-3'-phosphate
  modified_base 18: mod_base = OTHER; note = 2'-O-methyladenosine-3'-phosphate
  modified_base 19: mod_base = OTHER; note = 2'-O-methylguanosine-3'-phosphate
  modified_base 20: mod_base = OTHER; note = 2'-O-methyluridine-3'-phosphate
  modified_base 21: mod_base = OTHER; note = 2'-O-methyluridine-3'-phosphate ((2S,4R)-1-[29-[[2-(acetylamino)-2-deoxy-beta-D-galactopyra nosyl]oxy]-14,14-bis[[3-[[3-[[5-[[2-(acetylamino)-2-deoxy-b eta-D-galactopyranosyl]oxy]-1-oxopentyl]amino]propyl]amino] -3-oxopropoxy]methyl]-1,12,19,25-tetraoxo-16-oxa-13,20,24-t riazanonacos-1-yl]-4-hydroxy-2-pyrrolidinyl)methyl ester
gggtgaccgatggcttcagtt

SEQ ID NO: 641 - RNA, 23 nt, synthetic construct
  source 1..23: mol_type = other RNA
  modified_base 1: mod_base = OTHER; note = 2'-O-methyladenosine-3'-phosphorothioate
  modified_base 2: mod_base = OTHER; note = 2'-deoxy-2'-fluoroadenosine-3'-phosphorothioate
  modified_base 3: mod_base = OTHER; note = 2'-O-methylcytidine-3'-phosphate
  modified_base 4: mod_base = OTHER; note = 2'-O-methyluridine-3'-phosphate
  modified_base 5: mod_base = OTHER; note = 2'-O-methylguanosine-3'-phosphate
  modified_base 6: mod_base = OTHER; note = 2'-deoxy-2'-fluoroadenosine-3'-phosphate
  modified_base 7: mod_base = OTHER; note = 2'-O-methyladenosine-3'-phosphate
  modified_base 8: mod_base = OTHER; note = 2'-deoxy-2'-fluoroguanosine-3'-phosphate
  modified_base 9: mod_base = OTHER; note = 2'-deoxy-2'-fluorocytidine-3'-phosphate
  modified_base 10: mod_base = OTHER; note = 2'-O-methylcytidine-3'-phosphate
  modified_base 11: mod_base = OTHER; note = 2'-O-methyladenosine-3'-phosphate
  modified_base 12: mod_base = OTHER; note = 2'-O-methyluridine-3'-phosphate
  modified_base 13: mod_base = OTHER; note = 2'-O-methylcytidine-3'-phosphate
  modified_base 14: mod_base = OTHER; note = 2'-deoxy-2'-fluoroguanosine-3'-phosphate
  modified_base 15: mod_base = OTHER; note = 2'-O-methylguanosine-3'-phosphate
  modified_base 16: mod_base = OTHER; note = 2'-deoxy-2'-fluorouridine-3'-phosphate
  modified_base 17: mod_base = OTHER; note = 2'-O-methylcytidine-3'-phosphate
  modified_base 18: mod_base = OTHER; note = 2'-O-methyladenosine-3'-phosphate
  modified_base 19: mod_base = OTHER; note = 2'-O-methylcytidine-3'-phosphate
  modified_base 20: mod_base = OTHER; note = 2'-O-methylcytidine-3'-phosphate
  modified_base 21: mod_base = OTHER; note = 2'-O-methylcytidine-3'-phosphorothioate
  modified_base 22: mod_base = OTHER; note = 2'-O-methyladenosine-3'-phosphorothioate
  modified_base 23: mod_base = OTHER; note = 2'-O-methylguanosine
aactgaagccatcggtcacccag

SEQ ID NO: 642 - RNA, 23 nt, synthetic construct
  source 1..23: mol_type = other RNA
ctgggtgaccgatggcttcagtt

SEQ ID NO: 643 - RNA, 21 nt, synthetic construct
  source 1..21: mol_type = other RNA
  modified_base 1: mod_base = OTHER; note = 2'-O-methylguanosine-3'-phosphorothioate
  modified_base 2: mod_base = OTHER; note = 2'-O-methyluridine-3'-phosphorothioate
  modified_base 3: mod_base = OTHER; note = 2'-O-methyluridine-3'-phosphate
  modified_base 4: mod_base = OTHER; note = 2'-O-methylcytidine-3'-phosphate
  modified_base 5: mod_base = OTHER; note = 2'-O-methyladenosine-3'-phosphate
  modified_base 6: mod_base = OTHER; note = 2'-O-methyluridine-3'-phosphate
  modified_base 7: mod_base = OTHER; note = 2'-deoxy-2'-fluorocytidine-3'-phosphate
  modified_base 8: mod_base = OTHER; note = 2'-O-methylcytidine-3'-phosphate
  modified_base 9: mod_base = OTHER; note = 2'-deoxy-2'-fluorocytidine-3'-phosphate
  modified_base 10: mod_base = OTHER; note = 2'-deoxy-2'-fluorouridine-3'-phosphate
  modified_base 11: mod_base = OTHER; note = 2'-deoxy-2'-fluoroadenosine-3'-phosphate
  modified_base 12: mod_base = OTHER; note = 2'-O-methylguanosine-3'-phosphate
  modified_base 13: mod_base = OTHER; note = 2'-O-methyladenosine-3'-phosphate
  modified_base 14: mod_base = OTHER; note = 2'-O-methylguanosine-3'-phosphate
  modified_base 15: mod_base = OTHER; note = 2'-O-methylguanosine-3'-phosphate
  modified_base 16: mod_base = OTHER; note = 2'-O-methylcytidine-3'-phosphate
  modified_base 17: mod_base = OTHER; note = 2'-O-methyladenosine-3'-phosphate
  modified_base 18: mod_base = OTHER; note = 2'-O-methylguanosine-3'-phosphate
  modified_base 19: mod_base = OTHER; note = 2'-O-methylcytidine-3'-phosphate
  modified_base 20: mod_base = OTHER; note = 2'-O-methyluridine-3'-phosphate
  modified_base 21: mod_base = OTHER; note = 2'-O-methyluridine-3'-phosphate ((2S,4R)-1-[29-[[2-(acetylamino)-2-deoxy-beta-D-galactopyra nosyl]oxy]-14,14-bis[[3-[[3-[[5-[[2-(acetylamino)-2-deoxy-b eta-D-galactopyranosyl]oxy]-1-oxopentyl]amino]propyl]amino] -3-oxopropoxy]methyl]-1,12,19,25-tetraoxo-16-oxa-13,20,24-t riazanonacos-1-yl]-4-hydroxy-2-pyrrolidinyl)methyl ester
gttcatccctagaggcagctt

SEQ ID NO: 644 - RNA, 23 nt, synthetic construct
  source 1..23: mol_type = other RNA
  modified_base 1: mod_base = OTHER; note = 2'-O-methyladenosine-3'-phosphorothioate
  modified_base 2: mod_base = OTHER; note = 2'-deoxy-2'-fluoroadenosine-3'-phosphorothioate
  modified_base 3: mod_base = OTHER; note = 2'-O-methylguanosine-3'-phosphate
  modified_base 4: mod_base = OTHER; note = 2'-O-methylcytidine-3'-phosphate
  modified_base 5: mod_base = OTHER; note = 2'-O-methyluridine-3'-phosphate
  modified_base 6: mod_base = OTHER; note = 2'-deoxy-2'-fluoroguanosine-3'-phosphate
  modified_base 7: mod_base = OTHER; note = 2'-O-methylcytidine-3'-phosphate
  modified_base 8: mod_base = OTHER; note = 2'-deoxy-2'-fluorocytidine-3'-phosphate
  modified_base 9: mod_base = OTHER; note = 2'-deoxy-2'-fluorouridine-3'-phosphate
  modified_base 10: mod_base = OTHER; note = 2'-O-methylcytidine-3'-phosphate
  modified_base 11: mod_base = OTHER; note = 2'-O-methyluridine-3'-phosphate
  modified_base 12: mod_base = OTHER; note = 2'-O-methyladenosine-3'-phosphate
  modified_base 13: mod_base = OTHER; note = 2'-O-methylguanosine-3'-phosphate
  modified_base 14: mod_base = OTHER; note = 2'-deoxy-2'-fluoroguanosine-3'-phosphate
  modified_base 15: mod_base = OTHER; note = 2'-O-methylguanosine-3'-phosphate
  modified_base 16: mod_base = OTHER; note = 2'-deoxy-2'-fluoroadenosine-3'-phosphate
  modified_base 17: mod_base = OTHER; note = 2'-O-methyluridine-3'-phosphate
  modified_base 18: mod_base = OTHER; note = 2'-O-methylguanosine-3'-phosphate
  modified_base 19: mod_base = OTHER; note = 2'-O-methyladenosine-3'-phosphate
  modified_base 20: mod_base = OTHER; note = 2'-O-methyladenosine-3'-phosphate
  modified_base 21: mod_base = OTHER; note = 2'-O-methylcytidine-3'-phosphorothioate
  modified_base 22: mod_base = OTHER; note = 2'-O-methyluridine-3'-phosphorothioate
  modified_base 23: mod_base = OTHER; note = 2'-O-methylguanosine
aagctgcctctagggatgaactg

SEQ ID NO: 645 - RNA, 23 nt, synthetic construct
  source 1..23: mol_type = other RNA
cagttcatccctagaggcagctg

SEQ ID NO: 646 - RNA, 21 nt, synthetic construct
  source 1..21: mol_type = other RNA
  modified_base 1: mod_base = OTHER; note = 2'-O-methyladenosine-3'-phosphorothioate
  modified_base 2: mod_base = OTHER; note = 2'-O-methylcytidine-3'-phosphorothioate
  modified_base 3: mod_base = OTHER; note = 2'-O-methyluridine-3'-phosphate
  modified_base 4: mod_base = OTHER; note = 2'-O-methyladenosine-3'-phosphate
  modified_base 5: mod_base = OTHER; note = 2'-O-methylcytidine-3'-phosphate
  modified_base 6: mod_base = OTHER; note = 2'-O-methyluridine-3'-phosphate
  modified_base 7: mod_base = OTHER; note = 2'-deoxy-2'-fluoroguanosine-3'-phosphate
  modified_base 8: mod_base = OTHER; note = 2'-O-methylguanosine-3'-phosphate
  modified_base 9: mod_base = OTHER; note = 2'-deoxy-2'-fluoroadenosine-3'-phosphate
  modified_base 10: mod_base = OTHER; note = 2'-deoxy-2'-fluoroguanosine-3'-phosphate
  modified_base 11: mod_base = OTHER; note = 2'-deoxy-2'-fluorocytidine-3'-phosphate
  modified_base 12: mod_base = OTHER; note = 2'-O-methyladenosine-3'-phosphate
  modified_base 13: mod_base = OTHER; note = 2'-O-methylcytidine-3'-phosphate
  modified_base 14: mod_base = OTHER; note = 2'-O-methylcytidine-3'-phosphate
  modified_base 15: mod_base = OTHER; note = 2'-O-methylguanosine-3'-phosphate
  modified_base 16: mod_base = OTHER; note = 2'-O-methyluridine-3'-phosphate
  modified_base 17: mod_base = OTHER; note = 2'-O-methyluridine-3'-phosphate
  modified_base 18: mod_base = OTHER; note = 2'-O-methyladenosine-3'-phosphate
  modified_base 19: mod_base = OTHER; note = 2'-O-methyladenosine-3'-phosphate
  modified_base 20: mod_base = OTHER; note = 2'-O-methylguanosine-3'-phosphate
  modified_base 21: mod_base = OTHER; note = 2'-O-methyluridine-3'-phosphate ((2S,4R)-1-[29-[[2-(acetylamino)-2-deoxy-beta-D-galactopyra nosyl]oxy]-14,14-bis[[3-[[3-[[5-[[2-(acetylamino)-2-deoxy-b eta-D-galactopyranosyl]oxy]-1-oxopentyl]amino]propyl]amino] -3-oxopropoxy]methyl]-1,12,19,25-tetraoxo-16-oxa-13,20,24-t riazanonacos-1-yl]-4-hydroxy-2-pyrrolidinyl)methyl ester
actactggagcaccgttaagt

SEQ ID NO: 647 - RNA, 23 nt, synthetic construct
  source 1..23: mol_type = other RNA
  modified_base 1: mod_base = OTHER; note = 2'-O-methyladenosine-3'-phosphorothioate
  modified_base 2: mod_base = OTHER; note = 2'-deoxy-2'-fluorocytidine-3'-phosphorothioate
  modified_base 3: mod_base = OTHER; note = 2'-O-methyluridine-3'-phosphate
  modified_base 4: mod_base = OTHER; note = 2'-O-methyluridine-3'-phosphate
  modified_base 5: mod_base = OTHER; note = 2'-O-methyladenosine-3'-phosphate
  modified_base 6: mod_base = OTHER; note = 2'-deoxy-2'-fluoroadenosine-3'-phosphate
  modified_base 7: mod_base = OTHER; note = 2'-O-methylcytidine-3'-phosphate
  modified_base 8: mod_base = OTHER; note = 2'-deoxy-2'-fluoroguanosine-3'-phosphate
  modified_base 9: mod_base = OTHER; note = 2'-deoxy-2'-fluoroguanosine-3'-phosphate
  modified_base 10: mod_base = OTHER; note = 2'-O-methyluridine-3'-phosphate
  modified_base 11: mod_base = OTHER; note = 2'-O-methylguanosine-3'-phosphate
  modified_base 12: mod_base = OTHER; note = 2'-O-methylcytidine-3'-phosphate
  modified_base 13: mod_base = OTHER; note = 2'-O-methyluridine-3'-phosphate
  modified_base 14: mod_base = OTHER; note = 2'-deoxy-2'-fluorocytidine-3'-phosphate
  modified_base 15: mod_base = OTHER; note = 2'-O-methylcytidine-3'-phosphate
  modified_base 16: mod_base = OTHER; note = 2'-deoxy-2'-fluoroadenosine-3'-phosphate
  modified_base 17: mod_base = OTHER; note = 2'-O-methylguanosine-3'-phosphate
  modified_base 18: mod_base = OTHER; note = 2'-O-methyluridine-3'-phosphate
  modified_base 19: mod_base = OTHER; note = 2'-O-methyladenosine-3'-phosphate
  modified_base 20: mod_base = OTHER; note = 2'-O-methylguanosine-3'-phosphate
  modified_base 21: mod_base = OTHER; note = 2'-O-methyluridine-3'-phosphorothioate
  modified_base 22: mod_base = OTHER; note = 2'-O-methylcytidine-3'-phosphorothioate
  modified_base 23: mod_base = OTHER; note = 2'-O-methyluridine
acttaacggtgctccagtagtct

SEQ ID NO: 648 - RNA, 23 nt, synthetic construct
  source 1..23: mol_type = other RNA
agactactggagcaccgttaagg

SEQ ID NO: 649 - RNA, 21 nt, synthetic construct
  source 1..21: mol_type = other RNA
  modified_base 1: mod_base = OTHER; note = 2'-O-methylcytidine-3'-phosphorothioate
  modified_base 2: mod_base = OTHER; note = 2'-O-methyladenosine-3'-phosphorothioate
  modified_base 3: mod_base = OTHER; note = 2'-O-methylguanosine-3'-phosphate
  modified_base 4: mod_base = OTHER; note = 2'-O-methylcytidine-3'-phosphate
  modified_base 5: mod_base = OTHER; note = 2'-O-methyluridine-3'-phosphate
  modified_base 6: mod_base = OTHER; note = 2'-O-methylguanosine-3'-phosphate
  modified_base 7: mod_base = OTHER; note = 2'-deoxy-2'-fluorocytidine-3'-phosphate
  modified_base 8: mod_base = OTHER; note = 2'-O-methyluridine-3'-phosphate
  modified_base 9: mod_base = OTHER; note = 2'-deoxy-2'-fluorocytidine-3'-phosphate
  modified_base 10: mod_base = OTHER; note = 2'-deoxy-2'-fluorocytidine-3'-phosphate
  modified_base 11: mod_base = OTHER; note = 2'-deoxy-2'-fluoroadenosine-3'-phosphate
  modified_base 12: mod_base = OTHER; note = 2'-O-methylguanosine-3'-phosphate
  modified_base 13: mod_base = OTHER; note = 2'-O-methylguanosine-3'-phosphate
  modified_base 14: mod_base = OTHER; note = 2'-O-methyladenosine-3'-phosphate
  modified_base 15: mod_base = OTHER; note = 2'-O-methyladenosine-3'-phosphate
  modified_base 16: mod_base = OTHER; note = 2'-O-methylcytidine-3'-phosphate
  modified_base 17: mod_base = OTHER; note = 2'-O-methyladenosine-3'-phosphate
  modified_base 18: mod_base = OTHER; note = 2'-O-methylguanosine-3'-phosphate
  modified_base 19: mod_base = OTHER; note = 2'-O-methyladenosine-3'-phosphate
  modified_base 20: mod_base = OTHER; note = 2'-O-methylguanosine-3'-phosphate
  modified_base 21: mod_base = OTHER; note = 2'-O-methyluridine-3'-phosphate ((2S,4R)-1-[29-[[2-(acetylamino)-2-deoxy-beta-D-galactopyra nosyl]oxy]-14,14-bis[[3-[[3-[[5-[[2-(acetylamino)-2-deoxy-b eta-D-galactopyranosyl]oxy]-1-oxopentyl]amino]propyl]amino] -3-oxopropoxy]methyl]-1,12,19,25-tetraoxo-16-oxa-13,20,24-t riazanonacos-1-yl]-4-hydroxy-2-pyrrolidinyl)methyl ester
cagctgctccaggaacagagt

SEQ ID NO: 650 - RNA, 23 nt, synthetic construct
  source 1..23: mol_type = other RNA
  modified_base 1: mod_base = OTHER; note = 2'-O-methyladenosine-3'-phosphorothioate
  modified_base 2: mod_base = OTHER; note = 2'-deoxy-2'-fluorocytidine-3'-phosphorothioate
  modified_base 3: mod_base = OTHER; note = 2'-O-methyluridine-3'-phosphate
  modified_base 4: mod_base = OTHER; note = 2'-O-methylcytidine-3'-phosphate
  modified_base 5: mod_base = OTHER; note = 2'-O-methyluridine-3'-phosphate
  modified_base 6: mod_base = OTHER; note = 2'-deoxy-2'-fluoroguanosine-3'-phosphate
  modified_base 7: mod_base = OTHER; note = 2'-O-methyluridine-3'-phosphate
  modified_base 8: mod_base = OTHER; note = 2'-deoxy-2'-fluorouridine-3'-phosphate
  modified_base 9: mod_base = OTHER; note = 2'-deoxy-2'-fluorocytidine-3'-phosphate
  modified_base 10: mod_base = OTHER; note = 2'-O-methylcytidine-3'-phosphate
  modified_base 11: mod_base = OTHER; note = 2'-O-methyluridine-3'-phosphate
  modified_base 12: mod_base = OTHER; note = 2'-O-methylguanosine-3'-phosphate
  modified_base 13: mod_base = OTHER; note = 2'-O-methylguanosine-3'-phosphate
  modified_base 14: mod_base = OTHER; note = 2'-deoxy-2'-fluoroadenosine-3'-phosphate
  modified_base 15: mod_base = OTHER; note = 2'-O-methylguanosine-3'-phosphate
  modified_base 16: mod_base = OTHER; note = 2'-deoxy-2'-fluorocytidine-3'-phosphate
  modified_base 17: mod_base = OTHER; note = 2'-O-methyladenosine-3'-phosphate
  modified_base 18: mod_base = OTHER; note = 2'-O-methylguanosine-3'-phosphate
  modified_base 19: mod_base = OTHER; note = 2'-O-methylcytidine-3'-phosphate
  modified_base 20: mod_base = OTHER; note = 2'-O-methyluridine-3'-phosphate
  modified_base 21: mod_base = OTHER; note = 2'-O-methylguanosine-3'-phosphorothioate
  modified_base 22: mod_base = OTHER; note = 2'-O-methylcytidine-3'-phosphorothioate
  modified_base 23: mod_base = OTHER; note = 2'-O-methylcytidine
actctgttcctggagcagctgcc

SEQ ID NO: 651 - RNA, 23 nt, synthetic construct
  source 1..23: mol_type = other RNA
ggcagctgctccaggaacagagg

SEQ ID NO: 652 - RNA, 21 nt, synthetic construct
  source 1..21: mol_type = other RNA
  modified_base 1: mod_base = OTHER; note = 2'-O-methylcytidine-3'-phosphorothioate
  modified_base 2: mod_base = OTHER; note = 2'-O-methylguanosine-3'-phosphorothioate
  modified_base 3: mod_base = OTHER; note = 2'-O-methyladenosine-3'-phosphate
  modified_base 4: mod_base = OTHER; note = 2'-O-methylguanosine-3'-phosphate
  modified_base 5: mod_base = OTHER; note = 2'-O-methylcytidine-3'-phosphate
  modified_base 6: mod_base = OTHER; note = 2'-O-methyluridine-3'-phosphate
  modified_base 7: mod_base = OTHER; note = 2'-deoxy-2'-fluorouridine-3'-phosphate
  modified_base 8: mod_base = OTHER; note = 2'-O-methylcytidine-3'-phosphate
  modified_base 9: mod_base = OTHER; note = 2'-deoxy-2'-fluoroadenosine-3'-phosphate
  modified_base 10: mod_base = OTHER; note = 2'-deoxy-2'-fluoroguanosine-3'-phosphate
  modified_base 11: mod_base = OTHER; note = 2'-deoxy-2'-fluoroadenosine-3'-phosphate
  modified_base 12: mod_base = OTHER; note = 2'-O-methylguanosine-3'-phosphate
  modified_base 13: mod_base = OTHER; note = 2'-O-methylguanosine-3'-phosphate
  modified_base 14: mod_base = OTHER; note = 2'-O-methylcytidine-3'-phosphate
  modified_base 15: mod_base = OTHER; note = 2'-O-methylcytidine-3'-phosphate
  modified_base 16: mod_base = OTHER; note = 2'-O-methylguanosine-3'-phosphate
  modified_base 17: mod_base = OTHER; note = 2'-O-methyladenosine-3'-phosphate
  modified_base 18: mod_base = OTHER; note = 2'-O-methylguanosine-3'-phosphate
  modified_base 19: mod_base = OTHER; note = 2'-O-methylguanosine-3'-phosphate
  modified_base 20: mod_base = OTHER; note = 2'-O-methyladenosine-3'-phosphate
  modified_base 21: mod_base = OTHER; note = 2'-O-methyluridine-3'-phosphate ((2S,4R)-1-[29-[[2-(acetylamino)-2-deoxy-beta-D-galactopyra nosyl]oxy]-14,14-bis[[3-[[3-[[5-[[2-(acetylamino)-2-deoxy-b eta-D-galactopyranosyl]oxy]-1-oxopentyl]amino]propyl]amino] -3-oxopropoxy]methyl]-1,12,19,25-tetraoxo-16-oxa-13,20,24-t riazanonacos-1-yl]-4-hydroxy-2-pyrrolidinyl)methyl ester
cgagcttcagaggccgaggat

SEQ ID NO: 653 - RNA, 23 nt, synthetic construct
  source 1..23: mol_type = other RNA
  modified_base 1: mod_base = OTHER; note = 2'-O-methyladenosine-3'-phosphorothioate
  modified_base 2: mod_base = OTHER; note = 2'-deoxy-2'-fluorouridine-3'-phosphorothioate
  modified_base 3: mod_base = OTHER; note = 2'-O-methylcytidine-3'-phosphate
  modified_base 4: mod_base = OTHER; note = 2'-O-methylcytidine-3'-phosphate
  modified_base 5: mod_base = OTHER; note = 2'-O-methyluridine-3'-phosphate
  modified_base 6: mod_base = OTHER; note = 2'-deoxy-2'-fluorocytidine-3'-phosphate
  modified_base 7: mod_base = OTHER; note = 2'-O-methylguanosine-3'-phosphate
  modified_base 8: mod_base = OTHER; note = 2'-deoxy-2'-fluoroguanosine-3'-phosphate
  modified_base 9: mod_base = OTHER; note = 2'-deoxy-2'-fluorocytidine-3'-phosphate
  modified_base 10: mod_base = OTHER; note = 2'-O-methylcytidine-3'-phosphate
  modified_base 11: mod_base = OTHER; note = 2'-O-methyluridine-3'-phosphate
  modified_base 12: mod_base = OTHER; note = 2'-O-methylcytidine-3'-phosphate
  modified_base 13: mod_base = OTHER; note = 2'-O-methyluridine-3'-phosphate
  modified_base 14: mod_base = OTHER; note = 2'-deoxy-2'-fluoroguanosine-3'-phosphate
  modified_base 15: mod_base = OTHER; note = 2'-O-methyladenosine-3'-phosphate
  modified_base 16: mod_base = OTHER; note = 2'-deoxy-2'-fluoroadenosine-3'-phosphate
  modified_base 17: mod_base = OTHER; note = 2'-O-methylguanosine-3'-phosphate
  modified_base 18: mod_base = OTHER; note = 2'-O-methylcytidine-3'-phosphate
  modified_base 19: mod_base = OTHER; note = 2'-O-methyluridine-3'-phosphate
  modified_base 20: mod_base = OTHER; note = 2'-O-methylcytidine-3'-phosphate
  modified_base 21: mod_base = OTHER; note = 2'-O-methylguanosine-3'-phosphorothioate
  modified_base 22: mod_base = OTHER; note = 2'-O-methylguanosine-3'-phosphorothioate
  modified_base 23: mod_base = OTHER; note = 2'-O-methylguanosine
atcctcggcctctgaagctcggg

SEQ ID NO: 654 - RNA, 23 nt, synthetic construct
  source 1..23: mol_type = other RNA
cccgagcttcagaggccgaggat

SEQ ID NO: 655 - RNA, 21 nt, synthetic construct
  source 1..21: mol_type = other RNA
  modified_base 1: mod_base = OTHER; note = 2'-O-methylcytidine-3'-phosphorothioate
  modified_base 2: mod_base = OTHER; note = 2'-O-methyluridine-3'-phosphorothioate
  modified_base 3: mod_base = OTHER; note = 2'-O-methyladenosine-3'-phosphate
  modified_base 4: mod_base = OTHER; note = 2'-O-methylguanosine-3'-phosphate
  modified_base 5: mod_base = OTHER; note = 2'-O-methyladenosine-3'-phosphate
  modified_base 6: mod_base = OTHER; note = 2'-O-methylguanosine-3'-phosphate
  modified_base 7: mod_base = OTHER; note = 2'-deoxy-2'-fluoroguanosine-3'-phosphate
  modified_base 8: mod_base = OTHER; note = 2'-O-methylcytidine-3'-phosphate
  modified_base 9: mod_base = OTHER; note = 2'-deoxy-2'-fluoroadenosine-3'-phosphate
  modified_base 10: mod_base = OTHER; note = 2'-deoxy-2'-fluoroguanosine-3'-phosphate
  modified_base 11: mod_base = OTHER; note = 2'-deoxy-2'-fluorocytidine-3'-phosphate
  modified_base 12: mod_base = OTHER; note = 2'-O-methyluridine-3'-phosphate
  modified_base 13: mod_base = OTHER; note = 2'-O-methylguanosine-3'-phosphate
  modified_base 14: mod_base = OTHER; note = 2'-O-methylcytidine-3'-phosphate
  modified_base 15: mod_base = OTHER; note = 2'-O-methyluridine-3'-phosphate
  modified_base 16: mod_base = OTHER; note = 2'-O-methylcytidine-3'-phosphate
  modified_base 17: mod_base = OTHER; note = 2'-O-methylcytidine-3'-phosphate
  modified_base 18: mod_base = OTHER; note = 2'-O-methyladenosine-3'-phosphate
  modified_base 19: mod_base = OTHER; note = 2'-O-methylguanosine-3'-phosphate
  modified_base 20: mod_base = OTHER; note = 2'-O-methylguanosine-3'-phosphate
  modified_base 21: mod_base = OTHER; note = 2'-O-methyluridine-3'-phosphate ((2S,4R)-1-[29-[[2-(acetylamino)-2-deoxy-beta-D-galactopyra nosyl]oxy]-14,14-bis[[3-[[3-[[5-[[2-(acetylamino)-2-deoxy-b eta-D-galactopyranosyl]oxy]-1-oxopentyl]amino]propyl]amino] -3-oxopropoxy]methyl]-1,12,19,25-tetraoxo-16-oxa-13,20,24-t riazanonacos-1-yl]-4-hydroxy-2-pyrrolidinyl)methyl ester
ctagaggcagctgctccaggt

SEQ ID NO: 656 - RNA, 23 nt, synthetic construct
  source 1..23: mol_type = other RNA
  modified_base 1: mod_base = OTHER; note = 2'-O-methyladenosine-3'-phosphorothioate
  modified_base 2: mod_base = OTHER; note = 2'-deoxy-2'-fluorocytidine-3'-phosphorothioate
  modified_base 3: mod_base = OTHER; note = 2'-O-methylcytidine-3'-phosphate
  modified_base 4: mod_base = OTHER; note = 2'-O-methyluridine-3'-phosphate
  modified_base 5: mod_base = OTHER; note = 2'-O-methylguanosine-3'-phosphate
  modified_base 6: mod_base = OTHER; note = 2'-deoxy-2'-fluoroguanosine-3'-phosphate
  modified_base 7: mod_base = OTHER; note = 2'-O-methyladenosine-3'-phosphate
  modified_base 8: mod_base = OTHER; note = 2'-deoxy-2'-fluoroguanosine-3'-phosphate
  modified_base 9: mod_base = OTHER; note = 2'-deoxy-2'-fluorocytidine-3'-phosphate
  modified_base 10: mod_base = OTHER; note = 2'-O-methyladenosine-3'-phosphate
  modified_base 11: mod_base = OTHER; note = 2'-O-methylguanosine-3'-phosphate
  modified_base 12: mod_base = OTHER; note = 2'-O-methylcytidine-3'-phosphate
  modified_base 13: mod_base = OTHER; note = 2'-O-methyluridine-3'-phosphate
  modified_base 14: mod_base = OTHER; note = 2'-deoxy-2'-fluoroguanosine-3'-phosphate
  modified_base 15: mod_base = OTHER; note = 2'-O-methylcytidine-3'-phosphate
  modified_base 16: mod_base = OTHER; note = 2'-deoxy-2'-fluorocytidine-3'-phosphate
  modified_base 17: mod_base = OTHER; note = 2'-O-methyluridine-3'-phosphate
  modified_base 18: mod_base = OTHER; note = 2'-O-methylcytidine-3'-phosphate
  modified_base 19: mod_base = OTHER; note = 2'-O-methyluridine-3'-phosphate
  modified_base 20: mod_base = OTHER; note = 2'-O-methyladenosine-3'-phosphate
  modified_base 21: mod_base = OTHER; note = 2'-O-methylguanosine-3'-phosphorothioate
  modified_base 22: mod_base = OTHER; note = 2'-O-methylguanosine-3'-phosphorothioate
  modified_base 23: mod_base = OTHER; note = 2'-O-methylguanosine
acctggagcagctgcctctaggg

SEQ ID NO: 657 - RNA, 23 nt, synthetic construct
  source 1..23: mol_type = other RNA
ccctagaggcagctgctccagga

SEQ ID NO: 658 - RNA, 21 nt, synthetic construct
  source 1..21: mol_type = other RNA
  modified_base 1: mod_base = OTHER; note = 2'-O-methylguanosine-3'-phosphorothioate
  modified_base 2: mod_base = OTHER; note = 2'-O-methyladenosine-3'-phosphorothioate
  modified_base 3: mod_base = OTHER; note = 2'-O-methylguanosine-3'-phosphate
  modified_base 4: mod_base = OTHER; note = 2'-O-methyluridine-3'-phosphate
  modified_base 5: mod_base = OTHER; note = 2'-O-methylcytidine-3'-phosphate
  modified_base 6: mod_base = OTHER; note = 2'-O-methylcytidine-3'-phosphate
  modified_base 7: mod_base = OTHER; note = 2'-deoxy-2'-fluorocytidine-3'-phosphate
  modified_base 8: mod_base = OTHER; note = 2'-O-methyladenosine-3'-phosphate
  modified_base 9: mod_base = OTHER; note = 2'-deoxy-2'-fluoroguanosine-3'-phosphate
  modified_base 10: mod_base = OTHER; note = 2'-deoxy-2'-fluoroguanosine-3'-phosphate
  modified_base 11: mod_base = OTHER; note = 2'-deoxy-2'-fluorouridine-3'-phosphate
  modified_base 12: mod_base = OTHER; note = 2'-O-methylguanosine-3'-phosphate
  modified_base 13: mod_base = OTHER; note = 2'-O-methylguanosine-3'-phosphate
  modified_base 14: mod_base = OTHER; note = 2'-O-methylcytidine-3'-phosphate
  modified_base 15: mod_base = OTHER; note = 2'-O-methylcytidine-3'-phosphate
  modified_base 16: mod_base = OTHER; note = 2'-O-methylcytidine-3'-phosphate
  modified_base 17: mod_base = OTHER; note = 2'-O-methyladenosine-3'-phosphate
  modified_base 18: mod_base = OTHER; note = 2'-O-methylguanosine-3'-phosphate
  modified_base 19: mod_base = OTHER; note = 2'-O-methylcytidine-3'-phosphate
  modified_base 20: mod_base = OTHER; note = 2'-O-methyladenosine-3'-phosphate
  modified_base 21: mod_base = OTHER; note = 2'-O-methyluridine-3'-phosphate ((2S,4R)-1-[29-[[2-(acetylamino)-2-deoxy-beta-D-galactopyra nosyl]oxy]-14,14-bis[[3-[[3-[[5-[[2-(acetylamino)-2-deoxy-b eta-D-galactopyranosyl]oxy]-1-oxopentyl]amino]propyl]amino] -3-oxopropoxy]methyl]-1,12,19,25-tetraoxo-16-oxa-13,20,24-t riazanonacos-1-yl]-4-hydroxy-2-pyrrolidinyl)methyl ester
gagtcccaggtggcccagcat

SEQ ID NO: 659 - RNA, 23 nt, synthetic construct
  source 1..23: mol_type = other RNA
  modified_base 1: mod_base = OTHER; note = 2'-O-methyladenosine-3'-phosphorothioate
  modified_base 2: mod_base = OTHER; note = 2'-deoxy-2'-fluorouridine-3'-phosphorothioate
  modified_base 3: mod_base = OTHER; note = 2'-O-methylguanosine-3'-phosphate
  modified_base 4: mod_base = OTHER; note = 2'-O-methylcytidine-3'-phosphate
  modified_base 5: mod_base = OTHER; note = 2'-O-methyluridine-3'-phosphate
  modified_base 6: mod_base = OTHER; note = 2'-deoxy-2'-fluoroguanosine-3'-phosphate
  modified_base 7: mod_base = OTHER; note = 2'-O-methylguanosine-3'-phosphate
  modified_base 8: mod_base = OTHER; note = 2'-deoxy-2'-fluoroguanosine-3'-phosphate
  modified_base 9: mod_base = OTHER; note = 2'-deoxy-2'-fluorocytidine-3'-phosphate
  modified_base 10: mod_base = OTHER; note = 2'-O-methylcytidine-3'-phosphate
  modified_base 11: mod_base = OTHER; note = 2'-O-methyladenosine-3'-phosphate
  modified_base 12: mod_base = OTHER; note = 2'-O-methylcytidine-3'-phosphate
  modified_base 13: mod_base = OTHER; note = 2'-O-methylcytidine-3'-phosphate
  modified_base 14: mod_base = OTHER; note = 2'-deoxy-2'-fluorouridine-3'-phosphate
  modified_base 15: mod_base = OTHER; note = 2'-O-methylguanosine-3'-phosphate
  modified_base 16: mod_base = OTHER; note = 2'-deoxy-2'-fluoroguanosine-3'-phosphate
  modified_base 17: mod_base = OTHER; note = 2'-O-methylguanosine-3'-phosphate
  modified_base 18: mod_base = OTHER; note = 2'-O-methyladenosine-3'-phosphate
  modified_base 19: mod_base = OTHER; note = 2'-O-methylcytidine-3'-phosphate
  modified_base 20: mod_base = OTHER; note = 2'-O-methyluridine-3'-phosphate
  modified_base 21: mod_base = OTHER; note = 2'-O-methylcytidine-3'-phosphorothioate
  modified_base 22: mod_base = OTHER; note = 2'-O-methylcytidine-3'-phosphorothioate
  modified_base 23: mod_base = OTHER; note = 2'-O-methyluridine
atgctgggccacctgggactcct

SEQ ID NO: 660 - RNA, 23 nt, synthetic construct
  source 1..23: mol_type = other RNA
aggagtcccaggtggcccagcag

SEQ ID NO: 661 - RNA, 21 nt, synthetic construct
  source 1..21: mol_type = other RNA
  modified_base 1: mod_base = OTHER; note = 2'-O-methyladenosine-3'-phosphorothioate
  modified_base 2: mod_base = OTHER; note = 2'-O-methylguanosine-3'-phosphorothioate
  modified_base 3: mod_base = OTHER; note = 2'-O-methyladenosine-3'-phosphate
  modified_base 4: mod_base = OTHER; note = 2'-O-methylcytidine-3'-phosphate
  modified_base 5: mod_base = OTHER; note = 2'-O-methylcytidine-3'-phosphate
  modified_base 6: mod_base = OTHER; note = 2'-O-methylguanosine-3'-phosphate
  modified_base 7: mod_base = OTHER; note = 2'-deoxy-2'-fluorocytidine-3'-phosphate
  modified_base 8: mod_base = OTHER; note = 2'-O-methylcytidine-3'-phosphate
  modified_base 9: mod_base = OTHER; note = 2'-deoxy-2'-fluoroadenosine-3'-phosphate
  modified_base 10: mod_base = OTHER; note = 2'-deoxy-2'-fluoroadenosine-3'-phosphate
  modified_base 11: mod_base = OTHER; note = 2'-deoxy-2'-fluoroguanosine-3'-phosphate
  modified_base 12: mod_base = OTHER; note = 2'-O-methylguanosine-3'-phosphate
  modified_base 13: mod_base = OTHER; note = 2'-O-methyladenosine-3'-phosphate
  modified_base 14: mod_base = OTHER; note = 2'-O-methyluridine-3'-phosphate
  modified_base 15: mod_base = OTHER; note = 2'-O-methylguanosine-3'-phosphate
  modified_base 16: mod_base = OTHER; note = 2'-O-methylcytidine-3'-phosphate
  modified_base 17: mod_base = OTHER; note = 2'-O-methyladenosine-3'-phosphate
  modified_base 18: mod_base = OTHER; note = 2'-O-methylcytidine-3'-phosphate
  modified_base 19: mod_base = OTHER; note = 2'-O-methyluridine-3'-phosphate
  modified_base 20: mod_base = OTHER; note = 2'-O-methylguanosine-3'-phosphate
  modified_base 21: mod_base = OTHER; note = 2'-O-methyluridine-3'-phosphate ((2S,4R)-1-[29-[[2-(acetylamino)-2-deoxy-beta-D-galactopyra nosyl]oxy]-14,14-bis[[3-[[3-[[5-[[2-(acetylamino)-2-deoxy-b eta-D-galactopyranosyl]oxy]-1-oxopentyl]amino]propyl]amino] -3-oxopropoxy]methyl]-1,12,19,25-tetraoxo-16-oxa-13,20,24-t riazanonacos-1-yl]-4-hydroxy-2-pyrrolidinyl)methyl ester
agaccgccaaggatgcactgt

SEQ ID NO: 662 - RNA, 23 nt, synthetic construct
  source 1..23: mol_type = other RNA
  modified_base 1: mod_base = OTHER; note = 2'-O-methyladenosine-3'-phosphorothioate
  modified_base 2: mod_base = OTHER; note = 2'-deoxy-2'-fluorocytidine-3'-phosphorothioate
  modified_base 3: mod_base = OTHER; note = 2'-O-methyladenosine-3'-phosphate
  modified_base 4: mod_base = OTHER; note = 2'-O-methylguanosine-3'-phosphate
  modified_base 5: mod_base = OTHER; note = 2'-O-methyluridine-3'-phosphate
  modified_base 6: mod_base = OTHER; note = 2'-deoxy-2'-fluoroguanosine-3'-phosphate
  modified_base 7: mod_base = OTHER; note = 2'-O-methylcytidine-3'-phosphate
  modified_base 8: mod_base = OTHER; note = 2'-deoxy-2'-fluoroadenosine-3'-phosphate
  modified_base 9: mod_base = OTHER; note = 2'-deoxy-2'-fluorouridine-3'-phosphate
  modified_base 10: mod_base = OTHER; note = 2'-O-methylcytidine-3'-phosphate
  modified_base 11: mod_base = OTHER; note = 2'-O-methylcytidine-3'-phosphate
  modified_base 12: mod_base = OTHER; note = 2'-O-methyluridine-3'-phosphate
  modified_base 13: mod_base = OTHER; note = 2'-O-methyluridine-3'-phosphate
  modified_base 14: mod_base = OTHER; note = 2'-deoxy-2'-fluoroguanosine-3'-phosphate
  modified_base 15: mod_base = OTHER; note = 2'-O-methylguanosine-3'-phosphate
  modified_base 16: mod_base = OTHER; note = 2'-deoxy-2'-fluorocytidine-3'-phosphate
  modified_base 17: mod_base = OTHER; note = 2'-O-methylguanosine-3'-phosphate
  modified_base 18: mod_base = OTHER; note = 2'-O-methylguanosine-3'-phosphate
  modified_base 19: mod_base = OTHER; note = 2'-O-methyluridine-3'-phosphate
  modified_base 20: mod_base = OTHER; note = 2'-O-methylcytidine-3'-phosphate
  modified_base 21: mod_base = OTHER; note = 2'-O-methyluridine-3'-phosphorothioate
  modified_base 22: mod_base = OTHER; note = 2'-O-methyluridine-3'-phosphorothioate
  modified_base 23: mod_base = OTHER; note = 2'-O-methylguanosine
acagtgcatccttggcggtcttg

SEQ ID NO: 663 - RNA, 23 nt, synthetic construct
  source 1..23: mol_type = other RNA
caagaccgccaaggatgcactga

SEQ ID NO: 664 - RNA, 21 nt, synthetic construct
  source 1..21: mol_type = other RNA
  modified_base 1: mod_base = OTHER; note = 2'-O-methylcytidine-3'-phosphorothioate
  modified_base 2: mod_base = OTHER; note = 2'-O-methylcytidine-3'-phosphorothioate
  modified_base 3: mod_base = OTHER; note = 2'-O-methyladenosine-3'-phosphate
  modified_base 4: mod_base = OTHER; note = 2'-O-methylguanosine-3'-phosphate
  modified_base 5: mod_base = OTHER; note = 2'-O-methylguanosine-3'-phosphate
  modified_base 6: mod_base = OTHER; note = 2'-O-methyluridine-3'-phosphate
  modified_base 7: mod_base = OTHER; note = 2'-deoxy-2'-fluoroguanosine-3'-phosphate
  modified_base 8: mod_base = OTHER; note = 2'-O-methylguanosine-3'-phosphate
  modified_base 9: mod_base = OTHER; note = 2'-deoxy-2'-fluorocytidine-3'-phosphate
  modified_base 10: mod_base = OTHER; note = 2'-deoxy-2'-fluorocytidine-3'-phosphate
  modified_base 11: mod_base = OTHER; note = 2'-deoxy-2'-fluorocytidine-3'-phosphate
  modified_base 12: mod_base = OTHER; note = 2'-O-methyladenosine-3'-phosphate
  modified_base 13: mod_base = OTHER; note = 2'-O-methylguanosine-3'-phosphate
  modified_base 14: mod_base = OTHER; note = 2'-O-methylcytidine-3'-phosphate
  modified_base 15: mod_base = OTHER; note = 2'-O-methyladenosine-3'-phosphate
  modified_base 16: mod_base = OTHER; note = 2'-O-methylguanosine-3'-phosphate
  modified_base 17: mod_base = OTHER; note = 2'-O-methylguanosine-3'-phosphate
  modified_base 18: mod_base = OTHER; note = 2'-O-methylcytidine-3'-phosphate
  modified_base 19: mod_base = OTHER; note = 2'-O-methylcytidine-3'-phosphate
  modified_base 20: mod_base = OTHER; note = 2'-O-methyladenosine-3'-phosphate
  modified_base 21: mod_base = OTHER; note = 2'-O-methyluridine-3'-phosphate ((2S,4R)-1-[29-[[2-(acetylamino)-2-deoxy-beta-D-galactopyra nosyl]oxy]-14,14-bis[[3-[[3-[[5-[[2-(acetylamino)-2-deoxy-b eta-D-galactopyranosyl]oxy]-1-oxopentyl]amino]propyl]amino] -3-oxopropoxy]methyl]-1,12,19,25-tetraoxo-16-oxa-13,20,24-t riazanonacos-1-yl]-4-hydroxy-2-pyrrolidinyl)methyl ester
ccaggtggcccagcaggccat

SEQ ID NO: 665 - RNA, 23 nt, synthetic construct
  source 1..23: mol_type = other RNA
  modified_base 1: mod_base = OTHER; note = 2'-O-methyladenosine-3'-phosphorothioate
  modified_base 2: mod_base = OTHER; note = 2'-deoxy-2'-fluorouridine-3'-phosphorothioate
  modified_base 3: mod_base = OTHER; note = 2'-O-methylguanosine-3'-phosphate
  modified_base 4: mod_base = OTHER; note = 2'-O-methylguanosine-3'-phosphate
  modified_base 5: mod_base = OTHER; note = 2'-O-methylcytidine-3'-phosphate
  modified_base 6: mod_base = OTHER; note = 2'-deoxy-2'-fluorocytidine-3'-phosphate
  modified_base 7: mod_base = OTHER; note = 2'-O-methyluridine-3'-phosphate
  modified_base 8: mod_base = OTHER; note = 2'-deoxy-2'-fluoroguanosine-3'-phosphate
  modified_base 9: mod_base = OTHER; note = 2'-deoxy-2'-fluorocytidine-3'-phosphate
  modified_base 10: mod_base = OTHER; note = 2'-O-methyluridine-3'-phosphate
  modified_base 11: mod_base = OTHER; note = 2'-O-methylguanosine-3'-phosphate
  modified_base 12: mod_base = OTHER; note = 2'-O-methylguanosine-3'-phosphate
  modified_base 13: mod_base = OTHER; note = 2'-O-methylguanosine-3'-phosphate
  modified_base 14: mod_base = OTHER; note = 2'-deoxy-2'-fluorocytidine-3'-phosphate
  modified_base 15: mod_base = OTHER; note = 2'-O-methylcytidine-3'-phosphate
  modified_base 16: mod_base = OTHER; note = 2'-deoxy-2'-fluoroadenosine-3'-phosphate
  modified_base 17: mod_base = OTHER; note = 2'-O-methylcytidine-3'-phosphate
  modified_base 18: mod_base = OTHER; note = 2'-O-methylcytidine-3'-phosphate
  modified_base 19: mod_base = OTHER; note = 2'-O-methyluridine-3'-phosphate
  modified_base 20: mod_base = OTHER; note = 2'-O-methylguanosine-3'-phosphate
  modified_base 21: mod_base = OTHER; note = 2'-O-methylguanosine-3'-phosphorothioate
  modified_base 22: mod_base = OTHER; note = 2'-O-methylguanosine-3'-phosphorothioate
  modified_base 23: mod_base = OTHER; note = 2'-O-methyladenosine
atggcctgctgggccacctggga

SEQ ID NO: 666 - RNA, 23 nt, synthetic construct
  source 1..23: mol_type = other RNA
tcccaggtggcccagcaggccag

SEQ ID NO: 667 - RNA, 21 nt, synthetic construct
  source 1..21: mol_type = other RNA
  modified_base 1: mod_base = OTHER; note = 2'-O-methyladenosine-3'-phosphorothioate
  modified_base 2: mod_base = OTHER; note = 2'-O-methylcytidine-3'-phosphorothioate
  modified_base 3: mod_base = OTHER; note = 2'-O-methylguanosine-3'-phosphate
  modified_base 4: mod_base = OTHER; note = 2'-O-methylcytidine-3'-phosphate
  modified_base 5: mod_base = OTHER; note = 2'-O-methylcytidine-3'-phosphate
  modified_base 6: mod_base = OTHER; note = 2'-O-methyladenosine-3'-phosphate
  modified_base 7: mod_base = OTHER; note = 2'-deoxy-2'-fluorocytidine-3'-phosphate
  modified_base 8: mod_base = OTHER; note = 2'-O-methylcytidine-3'-phosphate
  modified_base 9: mod_base = OTHER; note = 2'-deoxy-2'-fluoroadenosine-3'-phosphate
  modified_base 10: mod_base = OTHER; note = 2'-deoxy-2'-fluoroadenosine-3'-phosphate
  modified_base 11: mod_base = OTHER; note = 2'-deoxy-2'-fluoroguanosine-3'-phosphate
  modified_base 12: mod_base = OTHER; note = 2'-O-methyladenosine-3'-phosphate
  modified_base 13: mod_base = OTHER; note = 2'-O-methylcytidine-3'-phosphate
  modified_base 14: mod_base = OTHER; note = 2'-O-methylcytidine-3'-phosphate
  modified_base 15: mod_base = OTHER; note = 2'-O-methylguanosine-3'-phosphate
  modified_base 16: mod_base = OTHER; note = 2'-O-methylcytidine-3'-phosphate
  modified_base 17: mod_base = OTHER; note = 2'-O-methylcytidine-3'-phosphate
  modified_base 18: mod_base = OTHER; note = 2'-O-methyladenosine-3'-phosphate
  modified_base 19: mod_base = OTHER; note = 2'-O-methyladenosine-3'-phosphate
  modified_base 20: mod_base = OTHER; note = 2'-O-methylguanosine-3'-phosphate
  modified_base 21: mod_base = OTHER; note = 2'-O-methyluridine-3'-phosphate ((2S,4R)-1-[29-[[2-(acetylamino)-2-deoxy-beta-D-galactopyra nosyl]oxy]-14,14-bis[[3-[[3-[[5-[[2-(acetylamino)-2-deoxy-b eta-D-galactopyranosyl]oxy]-1-oxopentyl]amino]propyl]amino] -3-oxopropoxy]methyl]-1,12,19,25-tetraoxo-16-oxa-13,20,24-t riazanonacos-1-yl]-4-hydroxy-2-pyrrolidinyl)methyl ester
acgccaccaagaccgccaagt

SEQ ID NO: 668 - RNA, 23 nt, synthetic construct
  source 1..23: mol_type = other RNA
  modified_base 1: mod_base = OTHER; note = 2'-O-methyladenosine-3'-phosphorothioate
  modified_base 2: mod_base = OTHER; note = 2'-deoxy-2'-fluorocytidine-3'-phosphorothioate
  modified_base 3: mod_base = OTHER; note = 2'-O-methyluridine-3'-phosphate
  modified_base 4: mod_base = OTHER; note = 2'-O-methyluridine-3'-phosphate
  modified_base 5: mod_base = OTHER; note = 2'-O-methylguanosine-3'-phosphate
  modified_base 6: mod_base = OTHER; note = 2'-deoxy-2'-fluoroguanosine-3'-phosphate
  modified_base 7: mod_base = OTHER; note = 2'-O-methylcytidine-3'-phosphate
  modified_base 8: mod_base = OTHER; note = 2'-deoxy-2'-fluoroguanosine-3'-phosphate
  modified_base 9: mod_base = OTHER; note = 2'-deoxy-2'-fluoroguanosine-3'-phosphate
  modified_base 10: mod_base = OTHER; note = 2'-O-methyluridine-3'-phosphate
  modified_base 11: mod_base = OTHER; note = 2'-O-methylcytidine-3'-phosphate
  modified_base 12: mod_base = OTHER; note = 2'-O-methyluridine-3'-phosphate
  modified_base 13: mod_base = OTHER; note = 2'-O-methyluridine-3'-phosphate
  modified_base 14: mod_base = OTHER; note = 2'-deoxy-2'-fluoroguanosine-3'-phosphate
  modified_base 15: mod_base = OTHER; note = 2'-O-methylguanosine-3'-phosphate
  modified_base 16: mod_base = OTHER; note = 2'-deoxy-2'-fluorouridine-3'-phosphate
  modified_base 17: mod_base = OTHER; note = 2'-O-methylguanosine-3'-phosphate
  modified_base 18: mod_base = OTHER; note = 2'-O-methylguanosine-3'-phosphate
  modified_base 19: mod_base = OTHER; note = 2'-O-methylcytidine-3'-phosphate
  modified_base 20: mod_base = OTHER; note = 2'-O-methylguanosine-3'-phosphate
  modified_base 21: mod_base = OTHER; note = 2'-O-methyluridine-3'-phosphorothioate
  modified_base 22: mod_base = OTHER; note = 2'-O-methylguanosine-3'-phosphorothioate
  modified_base 23: mod_base = OTHER; note = 2'-O-methylcytidine
acttggcggtcttggtggcgtgc

SEQ ID NO: 669 - RNA, 23 nt, synthetic construct
  source 1..23: mol_type = other RNA
gcacgccaccaagaccgccaagg

SEQ ID NO: 670 - RNA, 21 nt, synthetic construct
  source 1..21: mol_type = other RNA
  modified_base 1: mod_base = OTHER; note = 2'-O-methylguanosine-3'-phosphorothioate
  modified_base 2: mod_base = OTHER; note = 2'-O-methylguanosine-3'-phosphorothioate
  modified_base 3: mod_base = OTHER; note = 2'-O-methyluridine-3'-phosphate
  modified_base 4: mod_base = OTHER; note = 2'-O-methylguanosine-3'-phosphate
  modified_base 5: mod_base = OTHER; note = 2'-O-methyladenosine-3'-phosphate
  modified_base 6: mod_base = OTHER; note = 2'-O-methylcytidine-3'-phosphate
  modified_base 7: mod_base = OTHER; note = 2'-deoxy-2'-fluorocytidine-3'-phosphate
  modified_base 8: mod_base = OTHER; note = 2'-O-methylguanosine-3'-phosphate
  modified_base 9: mod_base = OTHER; note = 2'-deoxy-2'-fluoroadenosine-3'-phosphate
  modified_base 10: mod_base = OTHER; note = 2'-deoxy-2'-fluorouridine-3'-phosphate
  modified_base 11: mod_base = OTHER; note = 2'-deoxy-2'-fluoroguanosine-3'-phosphate
  modified_base 12: mod_base = OTHER; note = 2'-O-methylguanosine-3'-phosphate
  modified_base 13: mod_base = OTHER; note = 2'-O-methylcytidine-3'-phosphate
  modified_base 14: mod_base = OTHER; note = 2'-O-methyluridine-3'-phosphate
  modified_base 15: mod_base = OTHER; note = 2'-O-methyluridine-3'-phosphate
  modified_base 16: mod_base = OTHER; note = 2'-O-methylcytidine-3'-phosphate
  modified_base 17: mod_base = OTHER; note = 2'-O-methyladenosine-3'-phosphate
  modified_base 18: mod_base = OTHER; note = 2'-O-methylguanosine-3'-phosphate
  modified_base 19: mod_base = OTHER; note = 2'-O-methyluridine-3'-phosphate
  modified_base 20: mod_base = OTHER; note = 2'-O-methyluridine-3'-phosphate
  modified_base 21: mod_base = OTHER; note = 2'-O-methyluridine-3'-phosphate ((2S,4R)-1-[29-[[2-(acetylamino)-2-deoxy-beta-D-galactopyra nosyl]oxy]-14,14-bis[[3-[[3-[[5-[[2-(acetylamino)-2-deoxy-b eta-D-galactopyranosyl]oxy]-1-oxopentyl]amino]propyl]amino] -3-oxopropoxy]methyl]-1,12,19,25-tetraoxo-16-oxa-13,20,24-t riazanonacos-1-yl]-4-hydroxy-2-pyrrolidinyl)methyl ester
ggtgaccgatggcttcagttt

SEQ ID NO: 671 - RNA, 23 nt, synthetic construct
  source 1..23: mol_type = other RNA
  modified_base 1: mod_base = OTHER; note = 2'-O-methyladenosine-3'-phosphorothioate
  modified_base 2: mod_base = OTHER; note = 2'-deoxy-2'-fluoroadenosine-3'-phosphorothioate
  modified_base 3: mod_base = OTHER; note = 2'-O-methyladenosine-3'-phosphate
  modified_base 4: mod_base = OTHER; note = 2'-O-methylcytidine-3'-phosphate
  modified_base 5: mod_base = OTHER; note = 2'-O-methyluridine-3'-phosphate
  modified_base 6: mod_base = OTHER; note = 2'-deoxy-2'-fluoroguanosine-3'-phosphate
  modified_base 7: mod_base = OTHER; note = 2'-O-methyladenosine-3'-phosphate
  modified_base 8: mod_base = OTHER; note = 2'-deoxy-2'-fluoroadenosine-3'-phosphate
  modified_base 9: mod_base = OTHER; note = 2'-deoxy-2'-fluoroguanosine-3'-phosphate
  modified_base 10: mod_base = OTHER; note = 2'-O-methylcytidine-3'-phosphate
  modified_base 11: mod_base = OTHER; note = 2'-O-methylcytidine-3'-phosphate
  modified_base 12: mod_base = OTHER; note = 2'-O-methyladenosine-3'-phosphate
  modified_base 13: mod_base = OTHER; note = 2'-O-methyluridine-3'-phosphate
  modified_base 14: mod_base = OTHER; note = 2'-deoxy-2'-fluorocytidine-3'-phosphate
  modified_base 15: mod_base = OTHER; note = 2'-O-methylguanosine-3'-phosphate
  modified_base 16: mod_base = OTHER; note = 2'-deoxy-2'-fluoroguanosine-3'-phosphate
  modified_base 17: mod_base = OTHER; note = 2'-O-methyluridine-3'-phosphate
  modified_base 18: mod_base = OTHER; note = 2'-O-methylcytidine-3'-phosphate
  modified_base 19: mod_base = OTHER; note = 2'-O-methyladenosine-3'-phosphate
  modified_base 20: mod_base = OTHER; note = 2'-O-methylcytidine-3'-phosphate
  modified_base 21: mod_base = OTHER; note = 2'-O-methylcytidine-3'-phosphorothioate
  modified_base 22: mod_base = OTHER; note = 2'-O-methylcytidine-3'-phosphorothioate
  modified_base 23: mod_base = OTHER; note = 2'-O-methyladenosine
aaactgaagccatcggtcaccca

SEQ ID NO: 672 - RNA, 23 nt, synthetic construct
  source 1..23: mol_type = other RNA
tgggtgaccgatggcttcagttc

SEQ ID NO: 673 - RNA, 21 nt, synthetic construct
  source 1..21: mol_type = other RNA
  modified_base 1: mod_base = OTHER; note = 2'-O-methyluridine-3'-phosphorothioate
  modified_base 2: mod_base = OTHER; note = 2'-O-methyladenosine-3'-phosphorothioate
  modified_base 3: mod_base = OTHER; note = 2'-O-methylcytidine-3'-phosphate
  modified_base 4: mod_base = OTHER; note = 2'-O-methyluridine-3'-phosphate
  modified_base 5: mod_base = OTHER; note = 2'-O-methylguanosine-3'-phosphate
  modified_base 6: mod_base = OTHER; note = 2'-O-methylguanosine-3'-phosphate
  modified_base 7: mod_base = OTHER; note = 2'-deoxy-2'-fluoroadenosine-3'-phosphate
  modified_base 8: mod_base = OTHER; note = 2'-O-methylguanosine-3'-phosphate
  modified_base 9: mod_base = OTHER; note = 2'-deoxy-2'-fluorocytidine-3'-phosphate
  modified_base 10: mod_base = OTHER; note = 2'-deoxy-2'-fluoroadenosine-3'-phosphate
  modified_base 11: mod_base = OTHER; note = 2'-deoxy-2'-fluorocytidine-3'-phosphate
  modified_base 12: mod_base = OTHER; note = 2'-O-methylcytidine-3'-phosphate
  modified_base 13: mod_base = OTHER; note = 2'-O-methylguanosine-3'-phosphate
  modified_base 14: mod_base = OTHER; note = 2'-O-methyluridine-3'-phosphate
  modified_base 15: mod_base = OTHER; note = 2'-O-methyluridine-3'-phosphate
  modified_base 16: mod_base = OTHER; note = 2'-O-methyladenosine-3'-phosphate
  modified_base 17: mod_base = OTHER; note = 2'-O-methyladenosine-3'-phosphate
  modified_base 18: mod_base = OTHER; note = 2'-O-methylguanosine-3'-phosphate
  modified_base 19: mod_base = OTHER; note = 2'-O-methylguanosine-3'-phosphate
  modified_base 20: mod_base = OTHER; note = 2'-O-methyladenosine-3'-phosphate
  modified_base 21: mod_base = OTHER; note = 2'-O-methyluridine-3'-phosphate ((2S,4R)-1-[29-[[2-(acetylamino)-2-deoxy-beta-D-galactopyra nosyl]oxy]-14,14-bis[[3-[[3-[[5-[[2-(acetylamino)-2-deoxy-b eta-D-galactopyranosyl]oxy]-1-oxopentyl]amino]propyl]amino] -3-oxopropoxy]methyl]-1,12,19,25-tetraoxo-16-oxa-13,20,24-t riazanonacos-1-yl]-4-hydroxy-2-pyrrolidinyl)methyl ester
tactggagcaccgttaaggat

SEQ ID NO: 674 - RNA, 23 nt, synthetic construct
  source 1..23: mol_type = other RNA
  modified_base 1: mod_base = OTHER; note = 2'-O-methyladenosine-3'-phosphorothioate
  modified_base 2: mod_base = OTHER; note = 2'-deoxy-2'-fluorouridine-3'-phosphorothioate
  modified_base 3: mod_base = OTHER; note = 2'-O-methylcytidine-3'-phosphate
  modified_base 4: mod_base = OTHER; note = 2'-O-methylcytidine-3'-phosphate
  modified_base 5: mod_base = OTHER; note = 2'-O-methyluridine-3'-phosphate
  modified_base 6: mod_base = OTHER; note = 2'-deoxy-2'-fluorouridine-3'-phosphate
  modified_base 7: mod_base = OTHER; note = 2'-O-methyladenosine-3'-phosphate
  modified_base 8: mod_base = OTHER; note = 2'-deoxy-2'-fluoroadenosine-3'-phosphate
  modified_base 9: mod_base = OTHER; note = 2'-deoxy-2'-fluorocytidine-3'-phosphate
  modified_base 10: mod_base = OTHER; note = 2'-O-methylguanosine-3'-phosphate
  modified_base 11: mod_base = OTHER; note = 2'-O-methylguanosine-3'-phosphate
  modified_base 12: mod_base = OTHER; note = 2'-O-methyluridine-3'-phosphate
  modified_base 13: mod_base = OTHER; note = 2'-O-methylguanosine-3'-phosphate
  modified_base 14: mod_base = OTHER; note = 2'-deoxy-2'-fluorocytidine-3'-phosphate
  modified_base 15: mod_base = OTHER; note = 2'-O-methyluridine-3'-phosphate
  modified_base 16: mod_base = OTHER; note = 2'-deoxy-2'-fluorocytidine-3'-phosphate
  modified_base 17: mod_base = OTHER; note = 2'-O-methylcytidine-3'-phosphate
  modified_base 18: mod_base = OTHER; note = 2'-O-methyladenosine-3'-phosphate
  modified_base 19: mod_base = OTHER; note = 2'-O-methylguanosine-3'-phosphate
  modified_base 20: mod_base = OTHER; note = 2'-O-methyluridine-3'-phosphate
  modified_base 21: mod_base = OTHER; note = 2'-O-methyladenosine-3'-phosphorothioate
  modified_base 22: mod_base = OTHER; note = 2'-O-methylguanosine-3'-phosphorothioate
  modified_base 23: mod_base = OTHER; note = 2'-O-methyluridine
atccttaacggtgctccagtagt

SEQ ID NO: 675 - RNA, 23 nt, synthetic construct
  source 1..23: mol_type = other RNA
actactggagcaccgttaaggac

SEQ ID NO: 676 - RNA, 21 nt, synthetic construct
  source 1..21: mol_type = other RNA
  modified_base 1: mod_base = OTHER; note = 2'-O-methylguanosine-3'-phosphorothioate
  modified_base 2: mod_base = OTHER; note = 2'-O-methylguanosine-3'-phosphorothioate
  modified_base 3: mod_base = OTHER; note = 2'-O-methyladenosine-3'-phosphate
  modified_base 4: mod_base = OTHER; note = 2'-O-methylguanosine-3'-phosphate
  modified_base 5: mod_base = OTHER; note = 2'-O-methyluridine-3'-phosphate
  modified_base 6: mod_base = OTHER; note = 2'-O-methylcytidine-3'-phosphate
  modified_base 7: mod_base = OTHER; note = 2'-deoxy-2'-fluorocytidine-3'-phosphate
  modified_base 8: mod_base = OTHER; note = 2'-O-methylcytidine-3'-phosphate
  modified_base 9: mod_base = OTHER; note = 2'-deoxy-2'-fluoroadenosine-3'-phosphate
  modified_base 10: mod_base = OTHER; note = 2'-deoxy-2'-fluoroguanosine-3'-phosphate
  modified_base 11: mod_base = OTHER; note = 2'-deoxy-2'-fluoroguanosine-3'-phosphate
  modified_base 12: mod_base = OTHER; note = 2'-O-methyluridine-3'-phosphate
  modified_base 13: mod_base = OTHER; note = 2'-O-methylguanosine-3'-phosphate
  modified_base 14: mod_base = OTHER; note = 2'-O-methylguanosine-3'-phosphate
  modified_base 15: mod_base = OTHER; note = 2'-O-methylcytidine-3'-phosphate
  modified_base 16: mod_base = OTHER; note = 2'-O-methylcytidine-3'-phosphate
  modified_base 17: mod_base = OTHER; note = 2'-O-methylcytidine-3'-phosphate
  modified_base 18: mod_base = OTHER; note = 2'-O-methyladenosine-3'-phosphate
  modified_base 19: mod_base = OTHER; note = 2'-O-methylguanosine-3'-phosphate
  modified_base 20: mod_base = OTHER; note = 2'-O-methylcytidine-3'-phosphate
  modified_base 21: mod_base = OTHER; note = 2'-O-methyluridine-3'-phosphate ((2S,4R)-1-[29-[[2-(acetylamino)-2-deoxy-beta-D-galactopyra nosyl]oxy]-14,14-bis[[3-[[3-[[5-[[2-(acetylamino)-2-deoxy-b eta-D-galactopyranosyl]oxy]-1-oxopentyl]amino]propyl]amino] -3-oxopropoxy]methyl]-1,12,19,25-tetraoxo-16-oxa-13,20,24-t riazanonacos-1-yl]-4-hydroxy-2-pyrrolidinyl)methyl ester
ggagtcccaggtggcccagct

SEQ ID NO: 677 - RNA, 23 nt, synthetic construct
  source 1..23: mol_type = other RNA
  modified_base 1: mod_base = OTHER; note = 2'-O-methyladenosine-3'-phosphorothioate
  modified_base 2: mod_base = OTHER; note = 2'-deoxy-2'-fluoroguanosine-3'-phosphorothioate
  modified_base 3: mod_base = OTHER; note = 2'-O-methylcytidine-3'-phosphate
  modified_base 4: mod_base = OTHER; note = 2'-O-methyluridine-3'-phosphate
  modified_base 5: mod_base = OTHER; note = 2'-O-methylguanosine-3'-phosphate
  modified_base 6: mod_base = OTHER; note = 2'-deoxy-2'-fluoroguanosine-3'-phosphate
  modified_base 7: mod_base = OTHER; note = 2'-O-methylguanosine-3'-phosphate
  modified_base 8: mod_base = OTHER; note = 2'-deoxy-2'-fluorocytidine-3'-phosphate
  modified_base 9: mod_base = OTHER; note = 2'-deoxy-2'-fluorocytidine-3'-phosphate
  modified_base 10: mod_base = OTHER; note = 2'-O-methyladenosine-3'-phosphate
  modified_base 11: mod_base = OTHER; note = 2'-O-methylcytidine-3'-phosphate
  modified_base 12: mod_base = OTHER; note = 2'-O-methylcytidine-3'-phosphate
  modified_base 13: mod_base = OTHER; note = 2'-O-methyluridine-3'-phosphate
  modified_base 14: mod_base = OTHER; note = 2'-deoxy-2'-fluoroguanosine-3'-phosphate
  modified_base 15: mod_base = OTHER; note = 2'-O-methylguanosine-3'-phosphate
  modified_base 16: mod_base = OTHER; note = 2'-deoxy-2'-fluoroguanosine-3'-phosphate
  modified_base 17: mod_base = OTHER; note = 2'-O-methyladenosine-3'-phosphate
  modified_base 18: mod_base = OTHER; note = 2'-O-methylcytidine-3'-phosphate
  modified_base 19: mod_base = OTHER; note = 2'-O-methyluridine-3'-phosphate
  modified_base 20: mod_base = OTHER; note = 2'-O-methylcytidine-3'-phosphate
  modified_base 21: mod_base = OTHER; note = 2'-O-methylcytidine-3'-phosphorothioate
  modified_base 22: mod_base = OTHER; note = 2'-O-methyluridine-3'-phosphorothioate
  modified_base 23: mod_base = OTHER; note = 2'-O-methylguanosine
agctgggccacctgggactcctg

SEQ ID NO: 678 - RNA, 23 nt, synthetic construct
  source 1..23: mol_type = other RNA
caggagtcccaggtggcccagca

SEQ ID NO: 679 - RNA, 21 nt, synthetic construct
  source 1..21: mol_type = other RNA
  modified_base 1: mod_base = OTHER; note = 2'-O-methylguanosine-3'-phosphorothioate
  modified_base 2: mod_base = OTHER; note = 2'-O-methylcytidine-3'-phosphorothioate
  modified_base 3: mod_base = OTHER; note = 2'-O-methyladenosine-3'-phosphate
  modified_base 4: mod_base = OTHER; note = 2'-O-methylguanosine-3'-phosphate
  modified_base 5: mod_base = OTHER; note = 2'-O-methylguanosine-3'-phosphate
  modified_base 6: mod_base = OTHER; note = 2'-O-methyladenosine-3'-phosphate
  modified_base 7: mod_base = OTHER; note = 2'-deoxy-2'-fluoroguanosine-3'-phosphate
  modified_base 8: mod_base = OTHER; note = 2'-O-methyluridine-3'-phosphate
  modified_base 9: mod_base = OTHER; note = 2'-deoxy-2'-fluorocytidine-3'-phosphate
  modified_base 10: mod_base = OTHER; note = 2'-deoxy-2'-fluorocytidine-3'-phosphate
  modified_base 11: mod_base = OTHER; note = 2'-deoxy-2'-fluorocytidine-3'-phosphate
  modified_base 12: mod_base = OTHER; note = 2'-O-methyladenosine-3'-phosphate
  modified_base 13: mod_base = OTHER; note = 2'-O-methylguanosine-3'-phosphate
  modified_base 14: mod_base = OTHER; note = 2'-O-methylguanosine-3'-phosphate
  modified_base 15: mod_base = OTHER; note = 2'-O-methyluridine-3'-phosphate
  modified_base 16: mod_base = OTHER; note = 2'-O-methylguanosine-3'-phosphate
  modified_base 17: mod_base = OTHER; note = 2'-O-methylguanosine-3'-phosphate
  modified_base 18: mod_base = OTHER; note = 2'-O-methylcytidine-3'-phosphate
  modified_base 19: mod_base = OTHER; note = 2'-O-methylcytidine-3'-phosphate
  modified_base 20: mod_base = OTHER; note = 2'-O-methylcytidine-3'-phosphate
  modified_base 21: mod_base = OTHER; note = 2'-O-methyluridine-3'-phosphate ((2S,4R)-1-[29-[[2-(acetylamino)-2-deoxy-beta-D-galactopyra nosyl]oxy]-14,14-bis[[3-[[3-[[5-[[2-(acetylamino)-2-deoxy-b eta-D-galactopyranosyl]oxy]-1-oxopentyl]amino]propyl]amino] -3-oxopropoxy]methyl]-1,12,19,25-tetraoxo-16-oxa-13,20,24-t riazanonacos-1-yl]-4-hydroxy-2-pyrrolidinyl)methyl ester
gcaggagtcccaggtggccct

SEQ ID NO: 680 - RNA, 23 nt, synthetic construct
  source 1..23: mol_type = other RNA
  modified_base 1: mod_base = OTHER; note = 2'-O-methyladenosine-3'-phosphorothioate
  modified_base 2: mod_base = OTHER; note = 2'-deoxy-2'-fluoroguanosine-3'-phosphorothioate
  modified_base 3: mod_base = OTHER; note = 2'-O-methylguanosine-3'-phosphate
  modified_base 4: mod_base = OTHER; note = 2'-O-methylguanosine-3'-phosphate
  modified_base 5: mod_base = OTHER; note = 2'-O-methylcytidine-3'-phosphate
  modified_base 6: mod_base = OTHER; note = 2'-deoxy-2'-fluorocytidine-3'-phosphate
  modified_base 7: mod_base = OTHER; note = 2'-O-methyladenosine-3'-phosphate
  modified_base 8: mod_base = OTHER; note = 2'-deoxy-2'-fluorocytidine-3'-phosphate
  modified_base 9: mod_base = OTHER; note = 2'-deoxy-2'-fluorocytidine-3'-phosphate
  modified_base 10: mod_base = OTHER; note = 2'-O-methyluridine-3'-phosphate
  modified_base 11: mod_base = OTHER; note = 2'-O-methylguanosine-3'-phosphate
  modified_base 12: mod_base = OTHER; note = 2'-O-methylguanosine-3'-phosphate
  modified_base 13: mod_base = OTHER; note = 2'-O-methylguanosine-3'-phosphate
  modified_base 14: mod_base = OTHER; note = 2'-deoxy-2'-fluoroadenosine-3'-phosphate
  modified_base 15: mod_base = OTHER; note = 2'-O-methylcytidine-3'-phosphate
  modified_base 16: mod_base = OTHER; note = 2'-deoxy-2'-fluorouridine-3'-phosphate
  modified_base 17: mod_base = OTHER; note = 2'-O-methylcytidine-3'-phosphate
  modified_base 18: mod_base = OTHER; note = 2'-O-methylcytidine-3'-phosphate
  modified_base 19: mod_base = OTHER; note = 2'-O-methyluridine-3'-phosphate
  modified_base 20: mod_base = OTHER; note = 2'-O-methylguanosine-3'-phosphate
  modified_base 21: mod_base = OTHER; note = 2'-O-methylcytidine-3'-phosphorothioate
  modified_base 22: mod_base = OTHER; note = 2'-O-methyladenosine-3'-phosphorothioate
  modified_base 23: mod_base = OTHER; note = 2'-O-methylcytidine
agggccacctgggactcctgcac

SEQ ID NO: 681 - RNA, 23 nt, synthetic construct
  source 1..23: mol_type = other RNA
gtgcaggagtcccaggtggccca

SEQ ID NO: 682 - RNA, 21 nt, synthetic construct
  source 1..21: mol_type = other RNA
  modified_base 1: mod_base = OTHER; note = 2'-O-methyluridine-3'-phosphorothioate
  modified_base 2: mod_base = OTHER; note = 2'-O-methylguanosine-3'-phosphorothioate
  modified_base 3: mod_base = OTHER; note = 2'-O-methylcytidine-3'-phosphate
  modified_base 4: mod_base = OTHER; note = 2'-O-methyladenosine-3'-phosphate
  modified_base 5: mod_base = OTHER; note = 2'-O-methylguanosine-3'-phosphate
  modified_base 6: mod_base = OTHER; note = 2'-O-methylguanosine-3'-phosphate
  modified_base 7: mod_base = OTHER; note = 2'-deoxy-2'-fluoroadenosine-3'-phosphate
  modified_base 8: mod_base = OTHER; note = 2'-O-methylguanosine-3'-phosphate
  modified_base 9: mod_base = OTHER; note = 2'-deoxy-2'-fluorouridine-3'-phosphate
  modified_base 10: mod_base = OTHER; note = 2'-deoxy-2'-fluorocytidine-3'-phosphate
  modified_base 11: mod_base = OTHER; note = 2'-deoxy-2'-fluorocytidine-3'-phosphate
  modified_base 12: mod_base = OTHER; note = 2'-O-methylcytidine-3'-phosphate
  modified_base 13: mod_base = OTHER; note = 2'-O-methyladenosine-3'-phosphate
  modified_base 14: mod_base = OTHER; note = 2'-O-methylguanosine-3'-phosphate
  modified_base 15: mod_base = OTHER; note = 2'-O-methylguanosine-3'-phosphate
  modified_base 16: mod_base = OTHER; note = 2'-O-methyluridine-3'-phosphate
  modified_base 17: mod_base = OTHER; note = 2'-O-methylguanosine-3'-phosphate
  modified_base 18: mod_base = OTHER; note = 2'-O-methylguanosine-3'-phosphate
  modified_base 19: mod_base = OTHER; note = 2'-O-methylcytidine-3'-phosphate
  modified_base 20: mod_base = OTHER; note = 2'-O-methylcytidine-3'-phosphate
  modified_base 21: mod_base = OTHER; note = 2'-O-methyluridine-3'-phosphate ((2S,4R)-1-[29-[[2-(acetylamino)-2-deoxy-beta-D-galactopyra nosyl]oxy]-14,14-bis[[3-[[3-[[5-[[2-(acetylamino)-2-deoxy-b eta-D-galactopyranosyl]oxy]-1-oxopentyl]amino]propyl]amino] -3-oxopropoxy]methyl]-1,12,19,25-tetraoxo-16-oxa-13,20,24-t riazanonacos-1-yl]-4-hydroxy-2-pyrrolidinyl)methyl ester
tgcaggagtcccaggtggcct

SEQ ID NO: 683 - RNA, 23 nt, synthetic construct
  source 1..23: mol_type = other RNA
  modified_base 1: mod_base = OTHER; note = 2'-O-methyladenosine-3'-phosphorothioate
  modified_base 2: mod_base = OTHER; note = 2'-deoxy-2'-fluoroguanosine-3'-phosphorothioate
  modified_base 3: mod_base = OTHER; note = 2'-O-methylguanosine-3'-phosphate
  modified_base 4: mod_base = OTHER; note = 2'-O-methylcytidine-3'-phosphate
  modified_base 5: mod_base = OTHER; note = 2'-O-methylcytidine-3'-phosphate
  modified_base 6: mod_base = OTHER; note = 2'-deoxy-2'-fluoroadenosine-3'-phosphate
  modified_base 7: mod_base = OTHER; note = 2'-O-methylcytidine-3'-phosphate
  modified_base 8: mod_base = OTHER; note = 2'-deoxy-2'-fluorocytidine-3'-phosphate
  modified_base 9: mod_base = OTHER; note = 2'-deoxy-2'-fluorouridine-3'-phosphate
  modified_base 10: mod_base = OTHER; note = 2'-O-methylguanosine-3'-phosphate
  modified_base 11: mod_base = OTHER; note = 2'-O-methylguanosine-3'-phosphate
  modified_base 12: mod_base = OTHER; note = 2'-O-methylguanosine-3'-phosphate
  modified_base 13: mod_base = OTHER; note = 2'-O-methyladenosine-3'-phosphate
  modified_base 14: mod_base = OTHER; note = 2'-deoxy-2'-fluorocytidine-3'-phosphate
  modified_base 15: mod_base = OTHER; note = 2'-O-methyluridine-3'-phosphate
  modified_base 16: mod_base = OTHER; note = 2'-deoxy-2'-fluorocytidine-3'-phosphate
  modified_base 17: mod_base = OTHER; note = 2'-O-methylcytidine-3'-phosphate
  modified_base 18: mod_base = OTHER; note = 2'-O-methyluridine-3'-phosphate
  modified_base 19: mod_base = OTHER; note = 2'-O-methylguanosine-3'-phosphate
  modified_base 20: mod_base = OTHER; note = 2'-O-methylcytidine-3'-phosphate
  modified_base 21: mod_base = OTHER; note = 2'-O-methyladenosine-3'-phosphorothioate
  modified_base 22: mod_base = OTHER; note = 2'-O-methylcytidine-3'-phosphorothioate
  modified_base 23: mod_base = OTHER; note = 2'-O-methylguanosine
aggccacctgggactcctgcacg

SEQ ID NO: 684 - RNA, 23 nt, synthetic construct
  source 1..23: mol_type = other RNA
cgtgcaggagtcccaggtggccc

SEQ ID NO: 685 - RNA, 21 nt, synthetic construct
  source 1..21: mol_type = other RNA
  modified_base 1: mod_base = OTHER; note = 2'-O-methylcytidine-3'-phosphorothioate
  modified_base 2: mod_base = OTHER; note = 2'-O-methyladenosine-3'-phosphorothioate
  modified_base 3: mod_base = OTHER; note = 2'-O-methylguanosine-3'-phosphate
  modified_base 4: mod_base = OTHER; note = 2'-O-methylguanosine-3'-phosphate
  modified_base 5: mod_base = OTHER; note = 2'-O-methyladenosine-3'-phosphate
  modified_base 6: mod_base = OTHER; note = 2'-O-methylguanosine-3'-phosphate
  modified_base 7: mod_base = OTHER; note = 2'-deoxy-2'-fluorouridine-3'-phosphate
  modified_base 8: mod_base = OTHER; note = 2'-O-methylcytidine-3'-phosphate
  modified_base 9: mod_base = OTHER; note = 2'-deoxy-2'-fluorocytidine-3'-phosphate
  modified_base 10: mod_base = OTHER; note = 2'-deoxy-2'-fluorocytidine-3'-phosphate
  modified_base 11: mod_base = OTHER; note = 2'-deoxy-2'-fluoroadenosine-3'-phosphate
  modified_base 12: mod_base = OTHER; note = 2'-O-methylguanosine-3'-phosphate
  modified_base 13: mod_base = OTHER; note = 2'-O-methylguanosine-3'-phosphate
  modified_base 14: mod_base = OTHER; note = 2'-O-methyluridine-3'-phosphate
  modified_base 15: mod_base = OTHER; note = 2'-O-methylguanosine-3'-phosphate
  modified_base 16: mod_base = OTHER; note = 2'-O-methylguanosine-3'-phosphate
  modified_base 17: mod_base = OTHER; note = 2'-O-methylcytidine-3'-phosphate
  modified_base 18: mod_base = OTHER; note = 2'-O-methylcytidine-3'-phosphate
  modified_base 19: mod_base = OTHER; note = 2'-O-methylcytidine-3'-phosphate
  modified_base 20: mod_base = OTHER; note = 2'-O-methyladenosine-3'-phosphate
  modified_base 21: mod_base = OTHER; note = 2'-O-methyluridine-3'-phosphate ((2S,4R)-1-[29-[[2-(acetylamino)-2-deoxy-beta-D-galactopyra nosyl]oxy]-14,14-bis[[3-[[3-[[5-[[2-(acetylamino)-2-deoxy-b eta-D-galactopyranosyl]oxy]-1-oxopentyl]amino]propyl]amino] -3-oxopropoxy]methyl]-1,12,19,25-tetraoxo-16-oxa-13,20,24-t riazanonacos-1-yl]-4-hydroxy-2-pyrrolidinyl)methyl ester
caggagtcccaggtggcccat

SEQ ID NO: 686 - RNA, 23 nt, synthetic construct
  source 1..23: mol_type = other RNA
  modified_base 1: mod_base = OTHER; note = 2'-O-methyladenosine-3'-phosphorothioate
  modified_base 2: mod_base = OTHER; note = 2'-deoxy-2'-fluorouridine-3'-phosphorothioate
  modified_base 3: mod_base = OTHER; note = 2'-O-methylguanosine-3'-phosphate
  modified_base 4: mod_base = OTHER; note = 2'-O-methylguanosine-3'-phosphate
  modified_base 5: mod_base = OTHER; note = 2'-O-methylguanosine-3'-phosphate
  modified_base 6: mod_base = OTHER; note = 2'-deoxy-2'-fluorocytidine-3'-phosphate
  modified_base 7: mod_base = OTHER; note = 2'-O-methylcytidine-3'-phosphate
  modified_base 8: mod_base = OTHER; note = 2'-deoxy-2'-fluoroadenosine-3'-phosphate
  modified_base 9: mod_base = OTHER; note = 2'-deoxy-2'-fluorocytidine-3'-phosphate
  modified_base 10: mod_base = OTHER; note = 2'-O-methylcytidine-3'-phosphate
  modified_base 11: mod_base = OTHER; note = 2'-O-methyluridine-3'-phosphate
  modified_base 12: mod_base = OTHER; note = 2'-O-methylguanosine-3'-phosphate
  modified_base 13: mod_base = OTHER; note = 2'-O-methylguanosine-3'-phosphate
  modified_base 14: mod_base = OTHER; note = 2'-deoxy-2'-fluoroguanosine-3'-phosphate
  modified_base 15: mod_base = OTHER; note = 2'-O-methyladenosine-3'-phosphate
  modified_base 16: mod_base = OTHER; note = 2'-deoxy-2'-fluorocytidine-3'-phosphate
  modified_base 17: mod_base = OTHER; note = 2'-O-methyluridine-3'-phosphate
  modified_base 18: mod_base = OTHER; note = 2'-O-methylcytidine-3'-phosphate
  modified_base 19: mod_base = OTHER; note = 2'-O-methylcytidine-3'-phosphate
  modified_base 20: mod_base = OTHER; note = 2'-O-methyluridine-3'-phosphate
  modified_base 21: mod_base = OTHER; note = 2'-O-methylguanosine-3'-phosphorothioate
  modified_base 22: mod_base = OTHER; note = 2'-O-methylcytidine-3'-phosphorothioate
  modified_base 23: mod_base = OTHER; note = 2'-O-methyladenosine
atgggccacctgggactcctgca

SEQ ID NO: 687 - RNA, 23 nt, synthetic construct
  source 1..23: mol_type = other RNA
tgcaggagtcccaggtggcccag

SEQ ID NO: 688 - RNA, 21 nt, synthetic construct
  source 1..21: mol_type = other RNA
  modified_base 1: mod_base = OTHER; note = 2'-O-methyladenosine-3'-phosphorothioate
  modified_base 2: mod_base = OTHER; note = 2'-O-methylguanosine-3'-phosphorothioate
  modified_base 3: mod_base = OTHER; note = 2'-O-methylcytidine-3'-phosphate
  modified_base 4: mod_base = OTHER; note = 2'-O-methyluridine-3'-phosphate
  modified_base 5: mod_base = OTHER; note = 2'-O-methylguanosine-3'-phosphate
  modified_base 6: mod_base = OTHER; note = 2'-O-methylcytidine-3'-phosphate
  modified_base 7: mod_base = OTHER; note = 2'-deoxy-2'-fluorouridine-3'-phosphate
  modified_base 8: mod_base = OTHER; note = 2'-O-methylcytidine-3'-phosphate
  modified_base 9: mod_base = OTHER; note = 2'-deoxy-2'-fluorocytidine-3'-phosphate
  modified_base 10: mod_base = OTHER; note = 2'-deoxy-2'-fluoroadenosine-3'-phosphate
  modified_base 11: mod_base = OTHER; note = 2'-deoxy-2'-fluoroguanosine-3'-phosphate
  modified_base 12: mod_base = OTHER; note = 2'-O-methylguanosine-3'-phosphate
  modified_base 13: mod_base = OTHER; note = 2'-O-methyladenosine-3'-phosphate
  modified_base 14: mod_base = OTHER; note = 2'-O-methyladenosine-3'-phosphate
  modified_base 15: mod_base = OTHER; note = 2'-O-methylcytidine-3'-phosphate
  modified_base 16: mod_base = OTHER; note = 2'-O-methyladenosine-3'-phosphate
  modified_base 17: mod_base = OTHER; note = 2'-O-methylguanosine-3'-phosphate
  modified_base 18: mod_base = OTHER; note = 2'-O-methyladenosine-3'-phosphate
  modified_base 19: mod_base = OTHER; note = 2'-O-methylguanosine-3'-phosphate
  modified_base 20: mod_base = OTHER; note = 2'-O-methylguanosine-3'-phosphate
  modified_base 21: mod_base = OTHER; note = 2'-O-methyluridine-3'-phosphate ((2S,4R)-1-[29-[[2-(acetylamino)-2-deoxy-beta-D-galactopyra nosyl]oxy]-14,14-bis[[3-[[3-[[5-[[2-(acetylamino)-2-deoxy-b eta-D-galactopyranosyl]oxy]-1-oxopentyl]amino]propyl]amino] -3-oxopropoxy]methyl]-1,12,19,25-tetraoxo-16-oxa-13,20,24-t riazanonacos-1-yl]-4-hydroxy-2-pyrrolidinyl)methyl ester
agctgctccaggaacagaggt

SEQ ID NO: 689 - RNA, 23 nt, synthetic construct
  source 1..23: mol_type = other RNA
  modified_base 1: mod_base = OTHER; note = 2'-O-methyladenosine-3'-phosphorothioate
  modified_base 2: mod_base = OTHER; note = 2'-deoxy-2'-fluorocytidine-3'-phosphorothioate
  modified_base 3: mod_base = OTHER; note = 2'-O-methylcytidine-3'-phosphate
  modified_base 4: mod_base = OTHER; note = 2'-O-methyluridine-3'-phosphate
  modified_base 5: mod_base = OTHER; note = 2'-O-methylcytidine-3'-phosphate
  modified_base 6: mod_base = OTHER; note = 2'-deoxy-2'-fluorouridine-3'-phosphate
  modified_base 7: mod_base = OTHER; note = 2'-O-methylguanosine-3'-phosphate
  modified_base 8: mod_base = OTHER; note = 2'-deoxy-2'-fluorouridine-3'-phosphate
  modified_base 9: mod_base = OTHER; note = 2'-deoxy-2'-fluorouridine-3'-phosphate
  modified_base 10: mod_base = OTHER; note = 2'-O-methylcytidine-3'-phosphate
  modified_base 11: mod_base = OTHER; note = 2'-O-methylcytidine-3'-phosphate
  modified_base 12: mod_base = OTHER; note = 2'-O-methyluridine-3'-phosphate
  modified_base 13: mod_base = OTHER; note = 2'-O-methylguanosine-3'-phosphate
  modified_base 14: mod_base = OTHER; note = 2'-deoxy-2'-fluoroguanosine-3'-phosphate
  modified_base 15: mod_base = OTHER; note = 2'-O-methyladenosine-3'-phosphate
  modified_base 16: mod_base = OTHER; note = 2'-deoxy-2'-fluoroguanosine-3'-phosphate
  modified_base 17: mod_base = OTHER; note = 2'-O-methylcytidine-3'-phosphate
  modified_base 18: mod_base = OTHER; note = 2'-O-methyladenosine-3'-phosphate
  modified_base 19: mod_base = OTHER; note = 2'-O-methylguanosine-3'-phosphate
  modified_base 20: mod_base = OTHER; note = 2'-O-methylcytidine-3'-phosphate
  modified_base 21: mod_base = OTHER; note = 2'-O-methyluridine-3'-phosphorothioate
  modified_base 22: mod_base = OTHER; note = 2'-O-methylguanosine-3'-phosphorothioate
  modified_base 23: mod_base = OTHER; note = 2'-O-methylcytidine
acctctgttcctggagcagctgc

SEQ ID NO: 690 - RNA, 23 nt, synthetic construct
  source 1..23: mol_type = other RNA
gcagctgctccaggaacagaggt

SEQ ID NO: 691 - RNA, 21 nt, synthetic construct
  source 1..21: mol_type = other RNA
  modified_base 1: mod_base = OTHER; note = 2'-O-methyladenosine-3'-phosphorothioate
  modified_base 2: mod_base = OTHER; note = 2'-O-methylguanosine-3'-phosphorothioate
  modified_base 3: mod_base = OTHER; note = 2'-O-methyluridine-3'-phosphate
  modified_base 4: mod_base = OTHER; note = 2'-O-methylcytidine-3'-phosphate
  modified_base 5: mod_base = OTHER; note = 2'-O-methylcytidine-3'-phosphate
  modified_base 6: mod_base = OTHER; note = 2'-O-methylcytidine-3'-phosphate
  modified_base 7: mod_base = OTHER; note = 2'-deoxy-2'-fluoroadenosine-3'-phosphate
  modified_base 8: mod_base = OTHER; note = 2'-O-methylguanosine-3'-phosphate
  modified_base 9: mod_base = OTHER; note = 2'-deoxy-2'-fluoroguanosine-3'-phosphate
  modified_base 10: mod_base = OTHER; note = 2'-deoxy-2'-fluorouridine-3'-phosphate
  modified_base 11: mod_base = OTHER; note = 2'-deoxy-2'-fluoroguanosine-3'-phosphate
  modified_base 12: mod_base = OTHER; note = 2'-O-methylguanosine-3'-phosphate
  modified_base 13: mod_base = OTHER; note = 2'-O-methylcytidine-3'-phosphate
  modified_base 14: mod_base = OTHER; note = 2'-O-methylcytidine-3'-phosphate
  modified_base 15: mod_base = OTHER; note = 2'-O-methylcytidine-3'-phosphate
  modified_base 16: mod_base = OTHER; note = 2'-O-methyladenosine-3'-phosphate
  modified_base 17: mod_base = OTHER; note = 2'-O-methylguanosine-3'-phosphate
  modified_base 18: mod_base = OTHER; note = 2'-O-methylcytidine-3'-phosphate
  modified_base 19: mod_base = OTHER; note = 2'-O-methyladenosine-3'-phosphate
  modified_base 20: mod_base = OTHER; note = 2'-O-methylguanosine-3'-phosphate
  modified_base 21: mod_base = OTHER; note = 2'-O-methyluridine-3'-phosphate ((2S,4R)-1-[29-[[2-(acetylamino)-2-deoxy-beta-D-galactopyra nosyl]oxy]-14,14-bis[[3-[[3-[[5-[[2-(acetylamino)-2-deoxy-b eta-D-galactopyranosyl]oxy]-1-oxopentyl]amino]propyl]amino] -3-oxopropoxy]methyl]-1,12,19,25-tetraoxo-16-oxa-13,20,24-t riazanonacos-1-yl]-4-hydroxy-2-pyrrolidinyl)methyl ester
agtcccaggtggcccagcagt

SEQ ID NO: 692 - RNA, 23 nt, synthetic construct
  source 1..23: mol_type = other RNA
  modified_base 1: mod_base = OTHER; note = 2'-O-methyladenosine-3'-phosphorothioate
  modified_base 2: mod_base = OTHER; note = 2'-deoxy-2'-fluorocytidine-3'-phosphorothioate
  modified_base 3: mod_base = OTHER; note = 2'-O-methyluridine-3'-phosphate
  modified_base 4: mod_base = OTHER; note = 2'-O-methylguanosine-3'-phosphate
  modified_base 5: mod_base = OTHER; note = 2'-O-methylcytidine-3'-phosphate
  modified_base 6: mod_base = OTHER; note = 2'-deoxy-2'-fluorouridine-3'-phosphate
  modified_base 7: mod_base = OTHER; note = 2'-O-methylguanosine-3'-phosphate
  modified_base 8: mod_base = OTHER; note = 2'-deoxy-2'-fluoroguanosine-3'-phosphate
  modified_base 9: mod_base = OTHER; note = 2'-deoxy-2'-fluoroguanosine-3'-phosphate
  modified_base 10: mod_base = OTHER; note = 2'-O-methylcytidine-3'-phosphate
  modified_base 11: mod_base = OTHER; note = 2'-O-methylcytidine-3'-phosphate
  modified_base 12: mod_base = OTHER; note = 2'-O-methyladenosine-3'-phosphate
  modified_base 13: mod_base = OTHER; note = 2'-O-methylcytidine-3'-phosphate
  modified_base 14: mod_base = OTHER; note = 2'-deoxy-2'-fluorocytidine-3'-phosphate
  modified_base 15: mod_base = OTHER; note = 2'-O-methyluridine-3'-phosphate
  modified_base 16: mod_base = OTHER; note = 2'-deoxy-2'-fluoroguanosine-3'-phosphate
  modified_base 17: mod_base = OTHER; note = 2'-O-methylguanosine-3'-phosphate
  modified_base 18: mod_base = OTHER; note = 2'-O-methylguanosine-3'-phosphate
  modified_base 19: mod_base = OTHER; note = 2'-O-methyladenosine-3'-phosphate
  modified_base 20: mod_base = OTHER; note = 2'-O-methylcytidine-3'-phosphate
  modified_base 21: mod_base = OTHER; note = 2'-O-methyluridine-3'-phosphorothioate
  modified_base 22: mod_base = OTHER; note = 2'-O-methylcytidine-3'-phosphorothioate
  modified_base 23: mod_base = OTHER; note = 2'-O-methylcytidine
actgctgggccacctgggactcc

SEQ ID NO: 693 - RNA, 23 nt, synthetic construct
  source 1..23: mol_type = other RNA
ggagtcccaggtggcccagcagg

SEQ ID NO: 694 - RNA, 21 nt, synthetic construct
  source 1..21: mol_type = other RNA
  modified_base 1: mod_base = OTHER; note = 2'-O-methyladenosine-3'-phosphorothioate
  modified_base 2: mod_base = OTHER; note = 2'-O-methylguanosine-3'-phosphorothioate
  modified_base 3: mod_base = OTHER; note = 2'-O-methylguanosine-3'-phosphate
  modified_base 4: mod_base = OTHER; note = 2'-O-methyladenosine-3'-phosphate
  modified_base 5: mod_base = OTHER; note = 2'-O-methylguanosine-3'-phosphate
  modified_base 6: mod_base = OTHER; note = 2'-O-methyluridine-3'-phosphate
  modified_base 7: mod_base = OTHER; note = 2'-deoxy-2'-fluorocytidine-3'-phosphate
  modified_base 8: mod_base = OTHER; note = 2'-O-methylcytidine-3'-phosphate
  modified_base 9: mod_base = OTHER; note = 2'-deoxy-2'-fluorocytidine-3'-phosphate
  modified_base 10: mod_base = OTHER; note = 2'-deoxy-2'-fluoroadenosine-3'-phosphate
  modified_base 11: mod_base = OTHER; note = 2'-deoxy-2'-fluoroguanosine-3'-phosphate
  modified_base 12: mod_base = OTHER; note = 2'-O-methylguanosine-3'-phosphate
  modified_base 13: mod_base = OTHER; note = 2'-O-methyluridine-3'-phosphate
  modified_base 14: mod_base = OTHER; note = 2'-O-methylguanosine-3'-phosphate
  modified_base 15: mod_base = OTHER; note = 2'-O-methylguanosine-3'-phosphate
  modified_base 16: mod_base = OTHER; note = 2'-O-methylcytidine-3'-phosphate
  modified_base 17: mod_base = OTHER; note = 2'-O-methylcytidine-3'-phosphate
  modified_base 18: mod_base = OTHER; note = 2'-O-methylcytidine-3'-phosphate
  modified_base 19: mod_base = OTHER; note = 2'-O-methyladenosine-3'-phosphate
  modified_base 20: mod_base = OTHER; note = 2'-O-methylguanosine-3'-phosphate
  modified_base 21: mod_base = OTHER; note = 2'-O-methyluridine-3'-phosphate ((2S,4R)-1-[29-[[2-(acetylamino)-2-deoxy-beta-D-galactopyra nosyl]oxy]-14,14-bis[[3-[[3-[[5-[[2-(acetylamino)-2-deoxy-b eta-D-galactopyranosyl]oxy]-1-oxopentyl]amino]propyl]amino] -3-oxopropoxy]methyl]-1,12,19,25-tetraoxo-16-oxa-13,20,24-t riazanonacos-1-yl]-4-hydroxy-2-pyrrolidinyl)methyl ester
aggagtcccaggtggcccagt

SEQ ID NO: 695 - RNA, 23 nt, synthetic construct
  source 1..23: mol_type = other RNA
  modified_base 1: mod_base = OTHER; note = 2'-O-methyladenosine-3'-phosphorothioate
  modified_base 2: mod_base = OTHER; note = 2'-deoxy-2'-fluorocytidine-3'-phosphorothioate
  modified_base 3: mod_base = OTHER; note = 2'-O-methyluridine-3'-phosphate
  modified_base 4: mod_base = OTHER; note = 2'-O-methylguanosine-3'-phosphate
  modified_base 5: mod_base = OTHER; note = 2'-O-methylguanosine-3'-phosphate
  modified_base 6: mod_base = OTHER; note = 2'-deoxy-2'-fluoroguanosine-3'-phosphate
  modified_base 7: mod_base = OTHER; note = 2'-O-methylcytidine-3'-phosphate
  modified_base 8: mod_base = OTHER; note = 2'-deoxy-2'-fluorocytidine-3'-phosphate
  modified_base 9: mod_base = OTHER; note = 2'-deoxy-2'-fluoroadenosine-3'-phosphate
  modified_base 10: mod_base = OTHER; note = 2'-O-methylcytidine-3'-phosphate
  modified_base 11: mod_base = OTHER; note = 2'-O-methylcytidine-3'-phosphate
  modified_base 12: mod_base = OTHER; note = 2'-O-methyluridine-3'-phosphate
  modified_base 13: mod_base = OTHER; note = 2'-O-methylguanosine-3'-phosphate
  modified_base 14: mod_base = OTHER; note = 2'-deoxy-2'-fluoroguanosine-3'-phosphate
  modified_base 15: mod_base = OTHER; note = 2'-O-methylguanosine-3'-phosphate
  modified_base 16: mod_base = OTHER; note = 2'-deoxy-2'-fluoroadenosine-3'-phosphate
  modified_base 17: mod_base = OTHER; note = 2'-O-methylcytidine-3'-phosphate
  modified_base 18: mod_base = OTHER; note = 2'-O-methyluridine-3'-phosphate
  modified_base 19: mod_base = OTHER; note = 2'-O-methylcytidine-3'-phosphate
  modified_base 20: mod_base = OTHER; note = 2'-O-methylcytidine-3'-phosphate
  modified_base 21: mod_base = OTHER; note = 2'-O-methyluridine-3'-phosphorothioate
  modified_base 22: mod_base = OTHER; note = 2'-O-methylguanosine-3'-phosphorothioate
  modified_base 23: mod_base = OTHER; note = 2'-O-methylcytidine
actgggccacctgggactcctgc

SEQ ID NO: 696 - RNA, 23 nt, synthetic construct
  source 1..23: mol_type = other RNA
gcaggagtcccaggtggcccagc

SEQ ID NO: 697 - RNA, 23 nt, synthetic construct
  source 1..23: mol_type = other RNA
  modified_base 1: mod_base = OTHER; note = 2'-O-methyladenosine-3'-phosphorothioate
  modified_base 2: mod_base = OTHER; note = 2'-deoxy-2'-fluoroadenosine-3'-phosphorothioate
  modified_base 3: mod_base = OTHER; note = 2'-O-methylguanosine-3'-phosphate
  modified_base 4: mod_base = OTHER; note = 2'-O-methyluridine-3'-phosphate
  modified_base 5: mod_base = OTHER; note = 2'-O-methylcytidine-3'-phosphate
  modified_base 6: mod_base = OTHER; note = 2'-O-methyluridine-3'-phosphate
  modified_base 7: mod_base = OTHER; note = Thymidine-glycol nucleic acid (GNA), S-Isomer
  modified_base 8: mod_base = OTHER; note = 2'-O-methyluridine-3'-phosphate
  modified_base 9: mod_base = OTHER; note = 2'-O-methylcytidine-3'-phosphate
  modified_base 10: mod_base = OTHER; note = 2'-O-methyladenosine-3'-phosphate
  modified_base 11: mod_base = OTHER; note = 2'-O-methylguanosine-3'-phosphate
  modified_base 12: mod_base = OTHER; note = 2'-O-methylguanosine-3'-phosphate
  modified_base 13: mod_base = OTHER; note = 2'-O-methylguanosine-3'-phosphate
  modified_base 14: mod_base = OTHER; note = 2'-deoxy-2'-fluoroadenosine-3'-phosphate
  modified_base 15: mod_base = OTHER; note = 2'-O-methyladenosine-3'-phosphate
  modified_base 16: mod_base = OTHER; note = 2'-deoxy-2'-fluorocytidine-3'-phosphate
  modified_base 17: mod_base = OTHER; note = 2'-O-methyluridine-3'-phosphate
  modified_base 18: mod_base = OTHER; note = 2'-O-methylguanosine-3'-phosphate
  modified_base 19: mod_base = OTHER; note = 2'-O-methyladenosine-3'-phosphate
  modified_base 20: mod_base = OTHER; note = 2'-O-methyladenosine-3'-phosphate
  modified_base 21: mod_base = OTHER; note = 2'-O-methylguanosine-3'-phosphorothioate
  modified_base 22: mod_base = OTHER; note = 2'-O-methylcytidine-3'-phosphorothioate
  modified_base 23: mod_base = OTHER; note = 2'-O-methylcytidine
aagtctttcagggaactgaagcc

SEQ ID NO: 698 - RNA, 23 nt, synthetic construct
  source 1..23: mol_type = other RNA
  modified_base 1: mod_base = OTHER; note = 2'-O-methyladenosine-3'-phosphorothioate
  modified_base 2: mod_base = OTHER; note = 2'-deoxy-2'-fluorouridine-3'-phosphorothioate
  modified_base 3: mod_base = OTHER; note = 2'-O-methyluridine-3'-phosphate
  modified_base 4: mod_base = OTHER; note = 2'-O-methylcytidine-3'-phosphate
  modified_base 5: mod_base = OTHER; note = 2'-O-methyladenosine-3'-phosphate
  modified_base 6: mod_base = OTHER; note = 2'-O-methylguanosine-3'-phosphate
  modified_base 7: mod_base = OTHER; note = Guanosine-glycol nucleic acid (GNA), S-isomer
  modified_base 8: mod_base = OTHER; note = 2'-O-methylguanosine-3'-phosphate
  modified_base 9: mod_base = OTHER; note = 2'-O-methyladenosine-3'-phosphate
  modified_base 10: mod_base = OTHER; note = 2'-O-methyladenosine-3'-phosphate
  modified_base 11: mod_base = OTHER; note = 2'-O-methylcytidine-3'-phosphate
  modified_base 12: mod_base = OTHER; note = 2'-O-methyluridine-3'-phosphate
  modified_base 13: mod_base = OTHER; note = 2'-O-methylguanosine-3'-phosphate
  modified_base 14: mod_base = OTHER; note = 2'-deoxy-2'-fluoroadenosine-3'-phosphate
  modified_base 15: mod_base = OTHER; note = 2'-O-methyladenosine-3'-phosphate
  modified_base 16: mod_base = OTHER; note = 2'-deoxy-2'-fluoroguanosine-3'-phosphate
  modified_base 17: mod_base = OTHER; note = 2'-O-methylcytidine-3'-phosphate
  modified_base 18: mod_base = OTHER; note = 2'-O-methylcytidine-3'-phosphate
  modified_base 19: mod_base = OTHER; note = 2'-O-methyladenosine-3'-phosphate
  modified_base 20: mod_base = OTHER; note = 2'-O-methyluridine-3'-phosphate
  modified_base 21: mod_base = OTHER; note = 2'-O-methylcytidine-3'-phosphorothioate
  modified_base 22: mod_base = OTHER; note = 2'-O-methylguanosine-3'-phosphorothioate
  modified_base 23: mod_base = OTHER; note = 2'-O-methylguanosine
attcagggaactgaagccatcgg

SEQ ID NO: 699 - RNA, 23 nt, synthetic construct
  source 1..23: mol_type = other RNA
  modified_base 1: mod_base = OTHER; note = 2'-O-methyladenosine-3'-phosphorothioate
  modified_base 2: mod_base = OTHER; note = 2'-deoxy-2'-fluorocytidine-3'-phosphorothioate
  modified_base 3: mod_base = OTHER; note = 2'-O-methyladenosine-3'-phosphate
  modified_base 4: mod_base = OTHER; note = 2'-O-methylcytidine-3'-phosphate
  modified_base 5: mod_base = OTHER; note = 2'-O-methyluridine-3'-phosphate
  modified_base 6: mod_base = OTHER; note = 2'-O-methylguanosine-3'-phosphate
  modified_base 7: mod_base = OTHER; note = Adenosine-glycol nucleic acid (GNA), S-isomer
  modified_base 8: mod_base = OTHER; note = 2'-O-methylguanosine-3'-phosphate
  modified_base 9: mod_base = OTHER; note = 2'-O-methyladenosine-3'-phosphate
  modified_base 10: mod_base = OTHER; note = 2'-O-methyladenosine-3'-phosphate
  modified_base 11: mod_base = OTHER; note = 2'-O-methyluridine-3'-phosphate
  modified_base 12: mod_base = OTHER; note = 2'-O-methyladenosine-3'-phosphate
  modified_base 13: mod_base = OTHER; note = 2'-O-methylcytidine-3'-phosphate
  modified_base 14: mod_base = OTHER; note = 2'-deoxy-2'-fluorouridine-3'-phosphate
  modified_base 15: mod_base = OTHER; note = 2'-O-methylguanosine-3'-phosphate
  modified_base 16: mod_base = OTHER; note = 2'-deoxy-2'-fluorouridine-3'-phosphate
  modified_base 17: mod_base = OTHER; note = 2'-O-methylcytidine-3'-phosphate
  modified_base 18: mod_base = OTHER; note = 2'-O-methylcytidine-3'-phosphate
  modified_base 19: mod_base = OTHER; note = 2'-O-methylcytidine-3'-phosphate
  modified_base 20: mod_base = OTHER; note = 2'-O-methyluridine-3'-phosphate
  modified_base 21: mod_base = OTHER; note = 2'-O-methyluridine-3'-phosphorothioate
  modified_base 22: mod_base = OTHER; note = 2'-O-methyluridine-3'-phosphorothioate
  modified_base 23: mod_base = OTHER; note = 2'-O-methyluridine
acactgagaatactgtccctttt

SEQ ID NO: 700 - RNA, 23 nt, synthetic construct
  source 1..23: mol_type = other RNA
  modified_base 1: mod_base = OTHER; note = 2'-O-methyladenosine-3'-phosphorothioate
  modified_base 2: mod_base = OTHER; note = 2'-deoxy-2'-fluoroguanosine-3'-phosphorothioate
  modified_base 3: mod_base = OTHER; note = 2'-O-methyluridine-3'-phosphate
  modified_base 4: mod_base = OTHER; note = 2'-O-methylcytidine-3'-phosphate
  modified_base 5: mod_base = OTHER; note = 2'-O-methyluridine-3'-phosphate
  modified_base 6: mod_base = OTHER; note = 2'-O-methyluridine-3'-phosphate
  modified_base 7: mod_base = OTHER; note = Thymidine-glycol nucleic acid (GNA), S-Isomer
  modified_base 8: mod_base = OTHER; note = 2'-O-methylcytidine-3'-phosphate
  modified_base 9: mod_base = OTHER; note = 2'-O-methyladenosine-3'-phosphate
  modified_base 10: mod_base = OTHER; note = 2'-O-methylguanosine-3'-phosphate
  modified_base 11: mod_base = OTHER; note = 2'-O-methylguanosine-3'-phosphate
  modified_base 12: mod_base = OTHER; note = 2'-O-methylguanosine-3'-phosphate
  modified_base 13: mod_base = OTHER; note = 2'-O-methyladenosine-3'-phosphate
  modified_base 14: mod_base = OTHER; note = 2'-deoxy-2'-fluoroadenosine-3'-phosphate
  modified_base 15: mod_base = OTHER; note = 2'-O-methylcytidine-3'-phosphate
  modified_base 16: mod_base = OTHER; note = 2'-deoxy-2'-fluorouridine-3'-phosphate
  modified_base 17: mod_base = OTHER; note = 2'-O-methylguanosine-3'-phosphate
  modified_base 18: mod_base = OTHER; note = 2'-O-methyladenosine-3'-phosphate
  modified_base 19: mod_base = OTHER; note = 2'-O-methyladenosine-3'-phosphate
  modified_base 20: mod_base = OTHER; note = 2'-O-methylguanosine-3'-phosphate
  modified_base 21: mod_base = OTHER; note = 2'-O-methylcytidine-3'-phosphorothioate
  modified_base 22: mod_base = OTHER; note = 2'-O-methylcytidine-3'-phosphorothioate
  modified_base 23: mod_base = OTHER; note = 2'-O-methyladenosine
agtctttcagggaactgaagcca

SEQ ID NO: 701 - RNA, 23 nt, synthetic construct
  source 1..23: mol_type = other RNA
  modified_base 1: mod_base = OTHER; note = 2'-O-methyladenosine-3'-phosphorothioate
  modified_base 2: mod_base = OTHER; note = 2'-deoxy-2'-fluorouridine-3'-phosphorothioate
  modified_base 3: mod_base = OTHER; note = 2'-O-methyluridine-3'-phosphate
  modified_base 4: mod_base = OTHER; note = 2'-O-methylcytidine-3'-phosphate
  modified_base 5: mod_base = OTHER; note = 2'-O-methyluridine-3'-phosphate
  modified_base 6: mod_base = OTHER; note = 2'-O-methyluridine-3'-phosphate
  modified_base 7: mod_base = OTHER; note = Guanosine-glycol nucleic acid (GNA), S-isomer
  modified_base 8: mod_base = OTHER; note = 2'-O-methyluridine-3'-phosphate
  modified_base 9: mod_base = OTHER; note = 2'-O-methylcytidine-3'-phosphate
  modified_base 10: mod_base = OTHER; note = 2'-O-methylcytidine-3'-phosphate
  modified_base 11: mod_base = OTHER; note = 2'-O-methyladenosine-3'-phosphate
  modified_base 12: mod_base = OTHER; note = 2'-O-methylguanosine-3'-phosphate
  modified_base 13: mod_base = OTHER; note = 2'-O-methylcytidine-3'-phosphate
  modified_base 14: mod_base = OTHER; note = 2'-deoxy-2'-fluorouridine-3'-phosphate
  modified_base 15: mod_base = OTHER; note = 2'-O-methyluridine-3'-phosphate
  modified_base 16: mod_base = OTHER; note = 2'-deoxy-2'-fluorouridine-3'-phosphate
  modified_base 17: mod_base = OTHER; note = 2'-O-methyladenosine-3'-phosphate
  modified_base 18: mod_base = OTHER; note = 2'-O-methyluridine-3'-phosphate
  modified_base 19: mod_base = OTHER; note = 2'-O-methyluridine-3'-phosphate
  modified_base 20: mod_base = OTHER; note = 2'-O-methylguanosine-3'-phosphate
  modified_base 21: mod_base = OTHER; note = 2'-O-methylguanosine-3'-phosphorothioate
  modified_base 22: mod_base = OTHER; note = 2'-O-methylguanosine-3'-phosphorothioate
  modified_base 23: mod_base = OTHER; note = 2'-O-methyladenosine
attcttgtccagctttattggga

SEQ ID NO: 702 - RNA, 23 nt, synthetic construct
  source 1..23: mol_type = other RNA
  modified_base 1: mod_base = OTHER; note = 2'-O-methyladenosine-3'-phosphorothioate
  modified_base 2: mod_base = OTHER; note = 2'-deoxy-2'-fluorouridine-3'-phosphorothioate
  modified_base 3: mod_base = OTHER; note = 2'-O-methylguanosine-3'-phosphate
  modified_base 4: mod_base = OTHER; note = 2'-O-methyladenosine-3'-phosphate
  modified_base 5: mod_base = OTHER; note = 2'-O-methylguanosine-3'-phosphate
  modified_base 6: mod_base = OTHER; note = 2'-O-methyladenosine-3'-phosphate
  modified_base 7: mod_base = OTHER; note = Adenosine-glycol nucleic acid (GNA), S-isomer
  modified_base 8: mod_base = OTHER; note = 2'-O-methyluridine-3'-phosphate
  modified_base 9: mod_base = OTHER; note = 2'-O-methyladenosine-3'-phosphate
  modified_base 10: mod_base = OTHER; note = 2'-O-methylcytidine-3'-phosphate
  modified_base 11: mod_base = OTHER; note = 2'-O-methyluridine-3'-phosphate
  modified_base 12: mod_base = OTHER; note = 2'-O-methylguanosine-3'-phosphate
  modified_base 13: mod_base = OTHER; note = 2'-O-methyluridine-3'-phosphate
  modified_base 14: mod_base = OTHER; note = 2'-deoxy-2'-fluorocytidine-3'-phosphate
  modified_base 15: mod_base = OTHER; note = 2'-O-methylcytidine-3'-phosphate
  modified_base 16: mod_base = OTHER; note = 2'-deoxy-2'-fluorocytidine-3'-phosphate
  modified_base 17: mod_base = OTHER; note = 2'-O-methyluridine-3'-phosphate
  modified_base 18: mod_base = OTHER; note = 2'-O-methyluridine-3'-phosphate
  modified_base 19: mod_base = OTHER; note = 2'-O-methyluridine-3'-phosphate
  modified_base 20: mod_base = OTHER; note = 2'-O-methyluridine-3'-phosphate
  modified_base 21: mod_base = OTHER; note = 2'-O-methyladenosine-3'-phosphorothioate
  modified_base 22: mod_base = OTHER; note = 2'-O-methyladenosine-3'-phosphorothioate
  modified_base 23: mod_base = OTHER; note = 2'-O-methylguanosine
atgagaatactgtcccttttaag

SEQ ID NO: 703 - RNA, 23 nt, synthetic construct
  source 1..23: mol_type = other RNA
  modified_base 1: mod_base = OTHER; note = 2'-O-methyladenosine-3'-phosphorothioate
  modified_base 2: mod_base = OTHER; note = 2'-deoxy-2'-fluoroguanosine-3'-phosphorothioate
  modified_base 3: mod_base = OTHER; note = 2'-O-methyluridine-3'-phosphate
  modified_base 4: mod_base = OTHER; note = 2'-O-methylcytidine-3'-phosphate
  modified_base 5: mod_base = OTHER; note = 2'-O-methylcytidine-3'-phosphate
  modified_base 6: mod_base = OTHER; note = 2'-O-methyladenosine-3'-phosphate
  modified_base 7: mod_base = OTHER; note = Guanosine-glycol nucleic acid (GNA), S-isomer
  modified_base 8: mod_base = OTHER; note = 2'-O-methylcytidine-3'-phosphate
  modified_base 9: mod_base = OTHER; note = 2'-O-methyluridine-3'-phosphate
  modified_base 10: mod_base = OTHER; note = 2'-O-methyluridine-3'-phosphate
  modified_base 11: mod_base = OTHER; note = 2'-O-methyluridine-3'-phosphate
  modified_base 12: mod_base = OTHER; note = 2'-O-methyladenosine-3'-phosphate
  modified_base 13: mod_base = OTHER; note = 2'-O-methyluridine-3'-phosphate
  modified_base 14: mod_base = OTHER; note = 2'-deoxy-2'-fluorouridine-3'-phosphate
  modified_base 15: mod_base = OTHER; note = 2'-O-methylguanosine-3'-phosphate
  modified_base 16: mod_base = OTHER; note = 2'-deoxy-2'-fluoroguanosine-3'-phosphate
  modified_base 17: mod_base = OTHER; note = 2'-O-methylguanosine-3'-phosphate
  modified_base 18: mod_base = OTHER; note = 2'-O-methyladenosine-3'-phosphate
  modified_base 19: mod_base = OTHER; note = 2'-O-methylguanosine-3'-phosphate
  modified_base 20: mod_base = OTHER; note = 2'-O-methylguanosine-3'-phosphate
  modified_base 21: mod_base = OTHER; note = 2'-O-methylcytidine-3'-phosphorothioate
  modified_base 22: mod_base = OTHER; note = 2'-O-methylcytidine-3'-phosphorothioate
  modified_base 23: mod_base = OTHER; note = 2'-O-methyladenosine
agtccagctttattgggaggcca

SEQ ID NO: 704 - RNA, 23 nt, synthetic construct
  source 1..23: mol_type = other RNA
  modified_base 1: mod_base = OTHER; note = 2'-O-methyladenosine-3'-phosphorothioate
  modified_base 2: mod_base = OTHER; note = 2'-deoxy-2'-fluorouridine-3'-phosphorothioate
  modified_base 3: mod_base = OTHER; note = 2'-O-methyladenosine-3'-phosphate
  modified_base 4: mod_base = OTHER; note = 2'-O-methylcytidine-3'-phosphate
  modified_base 5: mod_base = OTHER; note = 2'-O-methyluridine-3'-phosphate
  modified_base 6: mod_base = OTHER; note = 2'-O-methylguanosine-3'-phosphate
  modified_base 7: mod_base = OTHER; note = Thymidine-glycol nucleic acid (GNA), S-Isomer
  modified_base 8: mod_base = OTHER; note = 2'-O-methylcytidine-3'-phosphate
  modified_base 9: mod_base = OTHER; note = 2'-O-methylcytidine-3'-phosphate
  modified_base 10: mod_base = OTHER; note = 2'-O-methylcytidine-3'-phosphate
  modified_base 11: mod_base = OTHER; note = 2'-O-methyluridine-3'-phosphate
  modified_base 12: mod_base = OTHER; note = 2'-O-methyluridine-3'-phosphate
  modified_base 13: mod_base = OTHER; note = 2'-O-methyluridine-3'-phosphate
  modified_base 14: mod_base = OTHER; note = 2'-deoxy-2'-fluorouridine-3'-phosphate
  modified_base 15: mod_base = OTHER; note = 2'-O-methyladenosine-3'-phosphate
  modified_base 16: mod_base = OTHER; note = 2'-deoxy-2'-fluoroadenosine-3'-phosphate
  modified_base 17: mod_base = OTHER; note = 2'-O-methylguanosine-3'-phosphate
  modified_base 18: mod_base = OTHER; note = 2'-O-methylcytidine-3'-phosphate
  modified_base 19: mod_base = OTHER; note = 2'-O-methyladenosine-3'-phosphate
  modified_base 20: mod_base = OTHER; note = 2'-O-methyladenosine-3'-phosphate
  modified_base 21: mod_base = OTHER; note = 2'-O-methylcytidine-3'-phosphorothioate
  modified_base 22: mod_base = OTHER; note = 2'-O-methylcytidine-3'-phosphorothioate
  modified_base 23: mod_base = OTHER; note = 2'-O-methyluridine
atactgtcccttttaagcaacct

SEQ ID NO: 705 - RNA, 23 nt, synthetic construct
  source 1..23: mol_type = other RNA
aggttgcttaaaagggacagtat

SEQ ID NO: 706 - RNA, 23 nt, synthetic construct
  source 1..23: mol_type = other RNA
  modified_base 1: mod_base = OTHER; note = 2'-O-methyladenosine-3'-phosphorothioate
  modified_base 2: mod_base = OTHER; note = 2'-deoxy-2'-fluoroguanosine-3'-phosphorothioate
  modified_base 3: mod_base = OTHER; note = 2'-O-methylcytidine-3'-phosphate
  modified_base 4: mod_base = OTHER; note = 2'-O-methyladenosine-3'-phosphate
  modified_base 5: mod_base = OTHER; note = 2'-O-methylcytidine-3'-phosphate
  modified_base 6: mod_base = OTHER; note = 2'-O-methyluridine-3'-phosphate
  modified_base 7: mod_base = OTHER; note = Guanosine-glycol nucleic acid (GNA), S-isomer
  modified_base 8: mod_base = OTHER; note = 2'-O-methyladenosine-3'-phosphate
  modified_base 9: mod_base = OTHER; note = 2'-O-methylguanosine-3'-phosphate
  modified_base 10: mod_base = OTHER; note = 2'-O-methyladenosine-3'-phosphate
  modified_base 11: mod_base = OTHER; note = 2'-O-methyladenosine-3'-phosphate
  modified_base 12: mod_base = OTHER; note = 2'-O-methyluridine-3'-phosphate
  modified_base 13: mod_base = OTHER; note = 2'-O-methyladenosine-3'-phosphate
  modified_base 14: mod_base = OTHER; note = 2'-deoxy-2'-fluorocytidine-3'-phosphate
  modified_base 15: mod_base = OTHER; note = 2'-O-methyluridine-3'-phosphate
  modified_base 16: mod_base = OTHER; note = 2'-deoxy-2'-fluoroguanosine-3'-phosphate
  modified_base 17: mod_base = OTHER; note = 2'-O-methyluridine-3'-phosphate
  modified_base 18: mod_base = OTHER; note = 2'-O-methylcytidine-3'-phosphate
  modified_base 19: mod_base = OTHER; note = 2'-O-methylcytidine-3'-phosphate
  modified_base 20: mod_base = OTHER; note = 2'-O-methylcytidine-3'-phosphate
  modified_base 21: mod_base = OTHER; note = 2'-O-methyluridine-3'-phosphorothioate
  modified_base 22: mod_base = OTHER; note = 2'-O-methyluridine-3'-phosphorothioate
  modified_base 23: mod_base = OTHER; note = 2'-O-methyluridine
agcactgagaatactgtcccttt

SEQ ID NO: 707 - RNA, 23 nt, synthetic construct
  source 1..23: mol_type = other RNA
  modified_base 1: mod_base = OTHER; note = 2'-O-methyladenosine-3'-phosphorothioate
  modified_base 2: mod_base = OTHER; note = 2'-deoxy-2'-fluorouridine-3'-phosphorothioate
  modified_base 3: mod_base = OTHER; note = 2'-O-methylcytidine-3'-phosphate
  modified_base 4: mod_base = OTHER; note = 2'-O-methyluridine-3'-phosphate
  modified_base 5: mod_base = OTHER; note = 2'-O-methyluridine-3'-phosphate
  modified_base 6: mod_base = OTHER; note = 2'-O-methylguanosine-3'-phosphate
  modified_base 7: mod_base = OTHER; note = Thymidine-glycol nucleic acid (GNA), S-Isomer
  modified_base 8: mod_base = OTHER; note = 2'-O-methylcytidine-3'-phosphate
  modified_base 9: mod_base = OTHER; note = 2'-O-methylcytidine-3'-phosphate
  modified_base 10: mod_base = OTHER; note = 2'-O-methyladenosine-3'-phosphate
  modified_base 11: mod_base = OTHER; note = 2'-O-methylguanosine-3'-phosphate
  modified_base 12: mod_base = OTHER; note = 2'-O-methylcytidine-3'-phosphate
  modified_base 13: mod_base = OTHER; note = 2'-O-methyluridine-3'-phosphate
  modified_base 14: mod_base = OTHER; note = 2'-deoxy-2'-fluorouridine-3'-phosphate
  modified_base 15: mod_base = OTHER; note = 2'-O-methyluridine-3'-phosphate
  modified_base 16: mod_base = OTHER; note = 2'-deoxy-2'-fluoroadenosine-3'-phosphate
  modified_base 17: mod_base = OTHER; note = 2'-O-methyluridine-3'-phosphate
  modified_base 18: mod_base = OTHER; note = 2'-O-methyluridine-3'-phosphate
  modified_base 19: mod_base = OTHER; note = 2'-O-methylguanosine-3'-phosphate
  modified_base 20: mod_base = OTHER; note = 2'-O-methylguanosine-3'-phosphate
  modified_base 21: mod_base = OTHER; note = 2'-O-methylguanosine-3'-phosphorothioate
  modified_base 22: mod_base = OTHER; note = 2'-O-methyladenosine-3'-phosphorothioate
  modified_base 23: mod_base = OTHER; note = 2'-O-methylguanosine
atcttgtccagctttattgggag

SEQ ID NO: 708 - RNA, 23 nt, synthetic construct
  source 1..23: mol_type = other RNA
  modified_base 1: mod_base = OTHER; note = 2'-O-methyladenosine-3'-phosphorothioate
  modified_base 2: mod_base = OTHER; note = 2'-deoxy-2'-fluorouridine-3'-phosphorothioate
  modified_base 3: mod_base = OTHER; note = 2'-O-methyladenosine-3'-phosphate
  modified_base 4: mod_base = OTHER; note = 2'-O-methylguanosine-3'-phosphate
  modified_base 5: mod_base = OTHER; note = 2'-O-methyluridine-3'-phosphate
  modified_base 6: mod_base = OTHER; note = 2'-O-methylcytidine-3'-phosphate
  modified_base 7: mod_base = OTHER; note = Thymidine-glycol nucleic acid (GNA), S-Isomer
  modified_base 8: mod_base = OTHER; note = 2'-O-methyluridine-3'-phosphate
  modified_base 9: mod_base = OTHER; note = 2'-O-methyluridine-3'-phosphate
  modified_base 10: mod_base = OTHER; note = 2'-O-methylcytidine-3'-phosphate
  modified_base 11: mod_base = OTHER; note = 2'-O-methyladenosine-3'-phosphate
  modified_base 12: mod_base = OTHER; note = 2'-O-methylguanosine-3'-phosphate
  modified_base 13: mod_base = OTHER; note = 2'-O-methylguanosine-3'-phosphate
  modified_base 14: mod_base = OTHER; note = 2'-deoxy-2'-fluoroguanosine-3'-phosphate
  modified_base 15: mod_base = OTHER; note = 2'-O-methyladenosine-3'-phosphate
  modified_base 16: mod_base = OTHER; note = 2'-deoxy-2'-fluoroadenosine-3'-phosphate
  modified_base 17: mod_base = OTHER; note = 2'-O-methylcytidine-3'-phosphate
  modified_base 18: mod_base = OTHER; note = 2'-O-methyluridine-3'-phosphate
  modified_base 19: mod_base = OTHER; note = 2'-O-methylguanosine-3'-phosphate
  modified_base 20: mod_base = OTHER; note = 2'-O-methyladenosine-3'-phosphate
  modified_base 21: mod_base = OTHER; note = 2'-O-methyladenosine-3'-phosphorothioate
  modified_base 22: mod_base = OTHER; note = 2'-O-methylguanosine-3'-phosphorothioate
  modified_base 23: mod_base = OTHER; note = 2'-O-methylcytidine
atagtctttcagggaactgaagc

SEQ ID NO: 709 - RNA, 23 nt, synthetic construct
  source 1..23: mol_type = other RNA
  modified_base 1: mod_base = OTHER; note = 2'-O-methyladenosine-3'-phosphorothioate
  modified_base 2: mod_base = OTHER; note = 2'-deoxy-2'-fluorouridine-3'-phosphorothioate
  modified_base 3: mod_base = OTHER; note = 2'-O-methylguanosine-3'-phosphate
  modified_base 4: mod_base = OTHER; note = 2'-O-methyluridine-3'-phosphate
  modified_base 5: mod_base = OTHER; note = 2'-O-methylcytidine-3'-phosphate
  modified_base 6: mod_base = OTHER; note = 2'-O-methylcytidine-3'-phosphate
  modified_base 7: mod_base = OTHER; note = Adenosine-glycol nucleic acid (GNA), S-isomer
  modified_base 8: mod_base = OTHER; note = 2'-O-methylguanosine-3'-phosphate
  modified_base 9: mod_base = OTHER; note = 2'-O-methylcytidine-3'-phosphate
  modified_base 10: mod_base = OTHER; note = 2'-O-methyluridine-3'-phosphate
  modified_base 11: mod_base = OTHER; note = 2'-O-methyluridine-3'-phosphate
  modified_base 12: mod_base = OTHER; note = 2'-O-methyluridine-3'-phosphate
  modified_base 13: mod_base = OTHER; note = 2'-O-methyladenosine-3'-phosphate
  modified_base 14: mod_base = OTHER; note = 2'-deoxy-2'-fluorouridine-3'-phosphate
  modified_base 15: mod_base = OTHER; note = 2'-O-methyluridine-3'-phosphate
  modified_base 16: mod_base = OTHER; note = 2'-deoxy-2'-fluoroguanosine-3'-phosphate
  modified_base 17: mod_base = OTHER; note = 2'-O-methylguanosine-3'-phosphate
  modified_base 18: mod_base = OTHER; note = 2'-O-methylguanosine-3'-phosphate
  modified_base 19: mod_base = OTHER; note = 2'-O-methyladenosine-3'-phosphate
  modified_base 20: mod_base = OTHER; note = 2'-O-methylguanosine-3'-phosphate
  modified_base 21: mod_base = OTHER; note = 2'-O-methylguanosine-3'-phosphorothioate
  modified_base 22: mod_base = OTHER; note = 2'-O-methylcytidine-3'-phosphorothioate
  modified_base 23: mod_base = OTHER; note = 2'-O-methylcytidine
atgtccagctttattgggaggcc

SEQ ID NO: 710 - RNA, 23 nt, synthetic construct
  source 1..23: mol_type = other RNA
  modified_base 1: mod_base = OTHER; note = 2'-O-methyladenosine-3'-phosphorothioate
  modified_base 2: mod_base = OTHER; note = 2'-deoxy-2'-fluorouridine-3'-phosphorothioate
  modified_base 3: mod_base = OTHER; note = 2'-O-methylguanosine-3'-phosphate
  modified_base 4: mod_base = OTHER; note = 2'-O-methyluridine-3'-phosphate
  modified_base 5: mod_base = OTHER; note = 2'-O-methylcytidine-3'-phosphate
  modified_base 6: mod_base = OTHER; note = 2'-O-methylcytidine-3'-phosphate
  modified_base 7: mod_base = OTHER; note = Thymidine-glycol nucleic acid (GNA), S-Isomer
  modified_base 8: mod_base = OTHER; note = 2'-O-methyluridine-3'-phosphate
  modified_base 9: mod_base = OTHER; note = 2'-O-methyladenosine-3'-phosphate
  modified_base 10: mod_base = OTHER; note = 2'-O-methyladenosine-3'-phosphate
  modified_base 11: mod_base = OTHER; note = 2'-O-methylcytidine-3'-phosphate
  modified_base 12: mod_base = OTHER; note = 2'-O-methylguanosine-3'-phosphate
  modified_base 13: mod_base = OTHER; note = 2'-O-methylguanosine-3'-phosphate
  modified_base 14: mod_base = OTHER; note = 2'-deoxy-2'-fluorouridine-3'-phosphate
  modified_base 15: mod_base = OTHER; note = 2'-O-methylguanosine-3'-phosphate
  modified_base 16: mod_base = OTHER; note = 2'-deoxy-2'-fluorocytidine-3'-phosphate
  modified_base 17: mod_base = OTHER; note = 2'-O-methyluridine-3'-phosphate
  modified_base 18: mod_base = OTHER; note = 2'-O-methylcytidine-3'-phosphate
  modified_base 19: mod_base = OTHER; note = 2'-O-methylcytidine-3'-phosphate
  modified_base 20: mod_base = OTHER; note = 2'-O-methyladenosine-3'-phosphate
  modified_base 21: mod_base = OTHER; note = 2'-O-methylguanosine-3'-phosphorothioate
  modified_base 22: mod_base = OTHER; note = 2'-O-methyluridine-3'-phosphorothioate
  modified_base 23: mod_base = OTHER; note = 2'-O-methyladenosine
atgtccttaacggtgctccagta

SEQ ID NO: 711 - RNA, 23 nt, synthetic construct
  source 1..23: mol_type = other RNA
  modified_base 1: mod_base = OTHER; note = 2'-O-methyladenosine-3'-phosphorothioate
  modified_base 2: mod_base = OTHER; note = 2'-deoxy-2'-fluorocytidine-3'-phosphorothioate
  modified_base 3: mod_base = OTHER; note = 2'-O-methyluridine-3'-phosphate
  modified_base 4: mod_base = OTHER; note = 2'-O-methylguanosine-3'-phosphate
  modified_base 5: mod_base = OTHER; note = 2'-O-methyladenosine-3'-phosphate
  modified_base 6: mod_base = OTHER; note = 2'-O-methylguanosine-3'-phosphate
  modified_base 7: mod_base = OTHER; note = Adenosine-glycol nucleic acid (GNA), S-isomer
  modified_base 8: mod_base = OTHER; note = 2'-O-methyladenosine-3'-phosphate
  modified_base 9: mod_base = OTHER; note = 2'-O-methyluridine-3'-phosphate
  modified_base 10: mod_base = OTHER; note = 2'-O-methyladenosine-3'-phosphate
  modified_base 11: mod_base = OTHER; note = 2'-O-methylcytidine-3'-phosphate
  modified_base 12: mod_base = OTHER; note = 2'-O-methyluridine-3'-phosphate
  modified_base 13: mod_base = OTHER; note = 2'-O-methylguanosine-3'-phosphate
  modified_base 14: mod_base = OTHER; note = 2'-deoxy-2'-fluorouridine-3'-phosphate
  modified_base 15: mod_base = OTHER; note = 2'-O-methylcytidine-3'-phosphate
  modified_base 16: mod_base = OTHER; note = 2'-deoxy-2'-fluorocytidine-3'-phosphate
  modified_base 17: mod_base = OTHER; note = 2'-O-methylcytidine-3'-phosphate
  modified_base 18: mod_base = OTHER; note = 2'-O-methyluridine-3'-phosphate
  modified_base 19: mod_base = OTHER; note = 2'-O-methyluridine-3'-phosphate
  modified_base 20: mod_base = OTHER; note = 2'-O-methyluridine-3'-phosphate
  modified_base 21: mod_base = OTHER; note = 2'-O-methyluridine-3'-phosphorothioate
  modified_base 22: mod_base = OTHER; note = 2'-O-methyladenosine-3'-phosphorothioate
  modified_base 23: mod_base = OTHER; note = 2'-O-methyladenosine
actgagaatactgtcccttttaa

SEQ ID NO: 712 - RNA, 23 nt, synthetic construct
  source 1..23: mol_type = other RNA
  modified_base 1: mod_base = OTHER; note = 2'-O-methyladenosine-3'-phosphorothioate
  modified_base 2: mod_base = OTHER; note = 2'-deoxy-2'-fluoroguanosine-3'-phosphorothioate
  modified_base 3: mod_base = OTHER; note = 2'-O-methyladenosine-3'-phosphate
  modified_base 4: mod_base = OTHER; note = 2'-O-methyladenosine-3'-phosphate
  modified_base 5: mod_base = OTHER; note = 2'-O-methylcytidine-3'-phosphate
  modified_base 6: mod_base = OTHER; note = 2'-O-methyluridine-3'-phosphate
  modified_base 7: mod_base = OTHER; note = Guanosine-glycol nucleic acid (GNA), S-isomer
  modified_base 8: mod_base = OTHER; note = 2'-O-methyladenosine-3'-phosphate
  modified_base 9: mod_base = OTHER; note = 2'-O-methyladenosine-3'-phosphate
  modified_base 10: mod_base = OTHER; note = 2'-O-methylguanosine-3'-phosphate
  modified_base 11: mod_base = OTHER; note = 2'-O-methylcytidine-3'-phosphate
  modified_base 12: mod_base = OTHER; note = 2'-O-methylcytidine-3'-phosphate
  modified_base 13: mod_base = OTHER; note = 2'-O-methyladenosine-3'-phosphate
  modified_base 14: mod_base = OTHER; note = 2'-deoxy-2'-fluorouridine-3'-phosphate
  modified_base 15: mod_base = OTHER; note = 2'-O-methylcytidine-3'-phosphate
  modified_base 16: mod_base = OTHER; note = 2'-deoxy-2'-fluoroguanosine-3'-phosphate
  modified_base 17: mod_base = OTHER; note = 2'-O-methylguanosine-3'-phosphate
  modified_base 18: mod_base = OTHER; note = 2'-O-methyluridine-3'-phosphate
  modified_base 19: mod_base = OTHER; note = 2'-O-methylcytidine-3'-phosphate
  modified_base 20: mod_base = OTHER; note = 2'-O-methyladenosine-3'-phosphate
  modified_base 21: mod_base = OTHER; note = 2'-O-methylcytidine-3'-phosphorothioate
  modified_base 22: mod_base = OTHER; note = 2'-O-methylcytidine-3'-phosphorothioate
  modified_base 23: mod_base = OTHER; note = 2'-O-methylcytidine
agaactgaagccatcggtcaccc

SEQ ID NO: 713 - RNA, 23 nt, synthetic construct
  source 1..23: mol_type = other RNA
  modified_base 1: mod_base = OTHER; note = 2'-O-methyladenosine-3'-phosphorothioate
  modified_base 2: mod_base = OTHER; note = 2'-deoxy-2'-fluoroguanosine-3'-phosphorothioate
  modified_base 3: mod_base = OTHER; note = 2'-O-methylguanosine-3'-phosphate
  modified_base 4: mod_base = OTHER; note = 2'-O-methyladenosine-3'-phosphate
  modified_base 5: mod_base = OTHER; note = 2'-O-methyladenosine-3'-phosphate
  modified_base 6: mod_base = OTHER; note = 2'-O-methylcytidine-3'-phosphate
  modified_base 7: mod_base = OTHER; note = Thymidine-glycol nucleic acid (GNA), S-Isomer
  modified_base 8: mod_base = OTHER; note = 2'-O-methylguanosine-3'-phosphate
  modified_base 9: mod_base = OTHER; note = 2'-O-methyladenosine-3'-phosphate
  modified_base 10: mod_base = OTHER; note = 2'-O-methyladenosine-3'-phosphate
  modified_base 11: mod_base = OTHER; note = 2'-O-methylguanosine-3'-phosphate
  modified_base 12: mod_base = OTHER; note = 2'-O-methylcytidine-3'-phosphate
  modified_base 13: mod_base = OTHER; note = 2'-O-methylcytidine-3'-phosphate
  modified_base 14: mod_base = OTHER; note = 2'-deoxy-2'-fluoroadenosine-3'-phosphate
  modified_base 15: mod_base = OTHER; note = 2'-O-methyluridine-3'-phosphate
  modified_base 16: mod_base = OTHER; note = 2'-deoxy-2'-fluorocytidine-3'-phosphate
  modified_base 17: mod_base = OTHER; note = 2'-O-methylguanosine-3'-phosphate
  modified_base 18: mod_base = OTHER; note = 2'-O-methylguanosine-3'-phosphate
  modified_base 19: mod_base = OTHER; note = 2'-O-methyluridine-3'-phosphate
  modified_base 20: mod_base = OTHER; note = 2'-O-methylcytidine-3'-phosphate
  modified_base 21: mod_base = OTHER; note = 2'-O-methyladenosine-3'-phosphorothioate
  modified_base 22: mod_base = OTHER; note = 2'-O-methylcytidine-3'-phosphorothioate
  modified_base 23: mod_base = OTHER; note = 2'-O-methylcytidine
aggaactgaagccatcggtcacc

SEQ ID NO: 714 - RNA, 23 nt, synthetic construct
  source 1..23: mol_type = other RNA
tagaatactgtcccttttaagca

SEQ ID NO: 715 - RNA, 23 nt, synthetic construct
  source 1..23: mol_type = other RNA
  modified_base 1: mod_base = OTHER; note = 2'-O-methyladenosine-3'-phosphorothioate
  modified_base 2: mod_base = OTHER; note = 2'-deoxy-2'-fluoroguanosine-3'-phosphorothioate
  modified_base 3: mod_base = OTHER; note = 2'-O-methyluridine-3'-phosphate
  modified_base 4: mod_base = OTHER; note = 2'-O-methyladenosine-3'-phosphate
  modified_base 5: mod_base = OTHER; note = 2'-O-methylguanosine-3'-phosphate
  modified_base 6: mod_base = OTHER; note = 2'-O-methyluridine-3'-phosphate
  modified_base 7: mod_base = OTHER; note = Cytidine-glycol nucleic acid (GNA), S-isomer
  modified_base 8: mod_base = OTHER; note = 2'-O-methyluridine-3'-phosphate
  modified_base 9: mod_base = OTHER; note = 2'-O-methyluridine-3'-phosphate
  modified_base 10: mod_base = OTHER; note = 2'-O-methyluridine-3'-phosphate
  modified_base 11: mod_base = OTHER; note = 2'-O-methylcytidine-3'-phosphate
  modified_base 12: mod_base = OTHER; note = 2'-O-methyladenosine-3'-phosphate
  modified_base 13: mod_base = OTHER; note = 2'-O-methylguanosine-3'-phosphate
  modified_base 14: mod_base = OTHER; note = 2'-deoxy-2'-fluoroguanosine-3'-phosphate
  modified_base 15: mod_base = OTHER; note = 2'-O-methylguanosine-3'-phosphate
  modified_base 16: mod_base = OTHER; note = 2'-deoxy-2'-fluoroadenosine-3'-phosphate
  modified_base 17: mod_base = OTHER; note = 2'-O-methyladenosine-3'-phosphate
  modified_base 18: mod_base = OTHER; note = 2'-O-methylcytidine-3'-phosphate
  modified_base 19: mod_base = OTHER; note = 2'-O-methyluridine-3'-phosphate
  modified_base 20: mod_base = OTHER; note = 2'-O-methylguanosine-3'-phosphate
  modified_base 21: mod_base = OTHER; note = 2'-O-methyladenosine-3'-phosphorothioate
  modified_base 22: mod_base = OTHER; note = 2'-O-methyladenosine-3'-phosphorothioate
  modified_base 23: mod_base = OTHER; note = 2'-O-methylguanosine
agtagtctttcagggaactgaag

SEQ ID NO: 716 - RNA, 23 nt, synthetic construct
  source 1..23: mol_type = other RNA
  modified_base 1: mod_base = OTHER; note = 2'-O-methyladenosine-3'-phosphorothioate
  modified_base 2: mod_base = OTHER; note = 2'-deoxy-2'-fluoroadenosine-3'-phosphorothioate
  modified_base 3: mod_base = OTHER; note = 2'-O-methylguanosine-3'-phosphate
  modified_base 4: mod_base = OTHER; note = 2'-O-methylcytidine-3'-phosphate
  modified_base 5: mod_base = OTHER; note = 2'-O-methyluridine-3'-phosphate
  modified_base 6: mod_base = OTHER; note = 2'-O-methyluridine-3'-phosphate
  modified_base 7: mod_base = OTHER; note = Cytidine-glycol nucleic acid (GNA), S-isomer
  modified_base 8: mod_base = OTHER; note = 2'-O-methyluridine-3'-phosphate
  modified_base 9: mod_base = OTHER; note = 2'-O-methyluridine-3'-phosphate
  modified_base 10: mod_base = OTHER; note = 2'-O-methylguanosine-3'-phosphate
  modified_base 11: mod_base = OTHER; note = 2'-O-methyluridine-3'-phosphate
  modified_base 12: mod_base = OTHER; note = 2'-O-methylcytidine-3'-phosphate
  modified_base 13: mod_base = OTHER; note = 2'-O-methylcytidine-3'-phosphate
  modified_base 14: mod_base = OTHER; note = 2'-deoxy-2'-fluoroadenosine-3'-phosphate
  modified_base 15: mod_base = OTHER; note = 2'-O-methylguanosine-3'-phosphate
  modified_base 16: mod_base = OTHER; note = 2'-deoxy-2'-fluorocytidine-3'-phosphate
  modified_base 17: mod_base = OTHER; note = 2'-O-methyluridine-3'-phosphate
  modified_base 18: mod_base = OTHER; note = 2'-O-methyluridine-3'-phosphate
  modified_base 19: mod_base = OTHER; note = 2'-O-methyluridine-3'-phosphate
  modified_base 20: mod_base = OTHER; note = 2'-O-methyladenosine-3'-phosphate
  modified_base 21: mod_base = OTHER; note = 2'-O-methyluridine-3'-phosphorothioate
  modified_base 22: mod_base = OTHER; note = 2'-O-methyluridine-3'-phosphorothioate
  modified_base 23: mod_base = OTHER; note = 2'-O-methylguanosine
aagcttcttgtccagctttattg

SEQ ID NO: 717 - RNA, 23 nt, synthetic construct
  source 1..23: mol_type = other RNA
  modified_base 1: mod_base = OTHER; note = 2'-O-methyladenosine-3'-phosphorothioate
  modified_base 2: mod_base = OTHER; note = 2'-deoxy-2'-fluorouridine-3'-phosphorothioate
  modified_base 3: mod_base = OTHER; note = 2'-O-methyluridine-3'-phosphate
  modified_base 4: mod_base = OTHER; note = 2'-O-methyluridine-3'-phosphate
  modified_base 5: mod_base = OTHER; note = 2'-O-methylcytidine-3'-phosphate
  modified_base 6: mod_base = OTHER; note = 2'-O-methyladenosine-3'-phosphate
  modified_base 7: mod_base = OTHER; note = Guanosine-glycol nucleic acid (GNA), S-isomer
  modified_base 8: mod_base = OTHER; note = 2'-O-methylguanosine-3'-phosphate
  modified_base 9: mod_base = OTHER; note = 2'-O-methylguanosine-3'-phosphate
  modified_base 10: mod_base = OTHER; note = 2'-O-methyladenosine-3'-phosphate
  modified_base 11: mod_base = OTHER; note = 2'-O-methyladenosine-3'-phosphate
  modified_base 12: mod_base = OTHER; note = 2'-O-methylcytidine-3'-phosphate
  modified_base 13: mod_base = OTHER; note = 2'-O-methyluridine-3'-phosphate
  modified_base 14: mod_base = OTHER; note = 2'-deoxy-2'-fluoroguanosine-3'-phosphate
  modified_base 15: mod_base = OTHER; note = 2'-O-methyladenosine-3'-phosphate
  modified_base 16: mod_base = OTHER; note = 2'-deoxy-2'-fluoroadenosine-3'-phosphate
  modified_base 17: mod_base = OTHER; note = 2'-O-methylguanosine-3'-phosphate
  modified_base 18: mod_base = OTHER; note = 2'-O-methylcytidine-3'-phosphate
  modified_base 19: mod_base = OTHER; note = 2'-O-methylcytidine-3'-phosphate
  modified_base 20: mod_base = OTHER; note = 2'-O-methyladenosine-3'-phosphate
  modified_base 21: mod_base = OTHER; note = 2'-O-methyluridine-3'-phosphorothioate
  modified_base 22: mod_base = OTHER; note = 2'-O-methylcytidine-3'-phosphorothioate
  modified_base 23: mod_base = OTHER; note = 2'-O-methylguanosine
atttcagggaactgaagccatcg

SEQ ID NO: 718 - RNA, 23 nt, synthetic construct
  source 1..23: mol_type = other RNA
  modified_base 1: mod_base = OTHER; note = 2'-O-methyladenosine-3'-phosphorothioate
  modified_base 2: mod_base = OTHER; note = 2'-deoxy-2'-fluoroadenosine-3'-phosphorothioate
  modified_base 3: mod_base = OTHER; note = 2'-O-methylguanosine-3'-phosphate
  modified_base 4: mod_base = OTHER; note = 2'-O-methylcytidine-3'-phosphate
  modified_base 5: mod_base = OTHER; note = 2'-O-methyladenosine-3'-phosphate
  modified_base 6: mod_base = OTHER; note = 2'-O-methylguanosine-3'-phosphate
  modified_base 7: mod_base = OTHER; note = Cytidine-glycol nucleic acid (GNA), S-isomer
  modified_base 8: mod_base = OTHER; note = 2'-O-methyluridine-3'-phosphate
  modified_base 9: mod_base = OTHER; note = 2'-O-methyluridine-3'-phosphate
  modified_base 10: mod_base = OTHER; note = 2'-O-methylcytidine-3'-phosphate
  modified_base 11: mod_base = OTHER; note = 2'-O-methyluridine-3'-phosphate
  modified_base 12: mod_base = OTHER; note = 2'-O-methyluridine-3'-phosphate
  modified_base 13: mod_base = OTHER; note = 2'-O-methylguanosine-3'-phosphate
  modified_base 14: mod_base = OTHER; note = 2'-deoxy-2'-fluorouridine-3'-phosphate
  modified_base 15: mod_base = OTHER; note = 2'-O-methylcytidine-3'-phosphate
  modified_base 16: mod_base = OTHER; note = 2'-deoxy-2'-fluorocytidine-3'-phosphate
  modified_base 17: mod_base = OTHER; note = 2'-O-methyladenosine-3'-phosphate
  modified_base 18: mod_base = OTHER; note = 2'-O-methylguanosine-3'-phosphate
  modified_base 19: mod_base = OTHER; note = 2'-O-methylcytidine-3'-phosphate
  modified_base 20: mod_base = OTHER; note = 2'-O-methyluridine-3'-phosphate
  modified_base 21: mod_base = OTHER; note = 2'-O-methyluridine-3'-phosphorothioate
  modified_base 22: mod_base = OTHER; note = 2'-O-methyluridine-3'-phosphorothioate
  modified_base 23: mod_base = OTHER; note = 2'-O-methyladenosine
aagcagcttcttgtccagcttta

SEQ ID NO: 719 - RNA, 23 nt, synthetic construct
  source 1..23: mol_type = other RNA
  modified_base 1: mod_base = OTHER; note = 2'-O-methyladenosine-3'-phosphorothioate
  modified_base 2: mod_base = OTHER; note = 2'-deoxy-2'-fluoroadenosine-3'-phosphorothioate
  modified_base 3: mod_base = OTHER; note = 2'-O-methyladenosine-3'-phosphate
  modified_base 4: mod_base = OTHER; note = 2'-O-methylcytidine-3'-phosphate
  modified_base 5: mod_base = OTHER; note = 2'-O-methyluridine-3'-phosphate
  modified_base 6: mod_base = OTHER; note = 2'-O-methyluridine-3'-phosphate
  modified_base 7: mod_base = OTHER; note = Guanosine-glycol nucleic acid (GNA), S-isomer
  modified_base 8: mod_base = OTHER; note = 2'-O-methyluridine-3'-phosphate
  modified_base 9: mod_base = OTHER; note = 2'-O-methylcytidine-3'-phosphate
  modified_base 10: mod_base = OTHER; note = 2'-O-methylcytidine-3'-phosphate
  modified_base 11: mod_base = OTHER; note = 2'-O-methyluridine-3'-phosphate
  modified_base 12: mod_base = OTHER; note = 2'-O-methyluridine-3'-phosphate
  modified_base 13: mod_base = OTHER; note = 2'-O-methyladenosine-3'-phosphate
  modified_base 14: mod_base = OTHER; note = 2'-deoxy-2'-fluoroadenosine-3'-phosphate
  modified_base 15: mod_base = OTHER; note = 2'-O-methylcytidine-3'-phosphate
  modified_base 16: mod_base = OTHER; note = 2'-deoxy-2'-fluoroguanosine-3'-phosphate
  modified_base 17: mod_base = OTHER; note = 2'-O-methylguanosine-3'-phosphate
  modified_base 18: mod_base = OTHER; note = 2'-O-methyluridine-3'-phosphate
  modified_base 19: mod_base = OTHER; note = 2'-O-methylguanosine-3'-phosphate
  modified_base 20: mod_base = OTHER; note = 2'-O-methylcytidine-3'-phosphate
  modified_base 21: mod_base = OTHER; note = 2'-O-methyluridine-3'-phosphorothioate
  modified_base 22: mod_base = OTHER; note = 2'-O-methylcytidine-3'-phosphorothioate
  modified_base 23: mod_base = OTHER; note = 2'-O-methylcytidine
aaacttgtccttaacggtgctcc

SEQ ID NO: 720 - RNA, 23 nt, synthetic construct
  source 1..23: mol_type = other RNA
  modified_base 1: mod_base = OTHER; note = 2'-O-methyladenosine-3'-phosphorothioate
  modified_base 2: mod_base = OTHER; note = 2'-deoxy-2'-fluorocytidine-3'-phosphorothioate
  modified_base 3: mod_base = OTHER; note = 2'-O-methyladenosine-3'-phosphate
  modified_base 4: mod_base = OTHER; note = 2'-O-methylguanosine-3'-phosphate
  modified_base 5: mod_base = OTHER; note = 2'-O-methyluridine-3'-phosphate
  modified_base 6: mod_base = OTHER; note = 2'-O-methyladenosine-3'-phosphate
  modified_base 7: mod_base = OTHER; note = Guanosine-glycol nucleic acid (GNA), S-isomer
  modified_base 8: mod_base = OTHER; note = 2'-O-methyluridine-3'-phosphate
  modified_base 9: mod_base = OTHER; note = 2'-O-methylcytidine-3'-phosphate
  modified_base 10: mod_base = OTHER; note = 2'-O-methyluridine-3'-phosphate
  modified_base 11: mod_base = OTHER; note = 2'-O-methyluridine-3'-phosphate
  modified_base 12: mod_base = OTHER; note = 2'-O-methyluridine-3'-phosphate
  modified_base 13: mod_base = OTHER; note = 2'-O-methylcytidine-3'-phosphate
  modified_base 14: mod_base = OTHER; note = 2'-deoxy-2'-fluoroadenosine-3'-phosphate
  modified_base 15: mod_base = OTHER; note = 2'-O-methylguanosine-3'-phosphate
  modified_base 16: mod_base = OTHER; note = 2'-deoxy-2'-fluoroguanosine-3'-phosphate
  modified_base 17: mod_base = OTHER; note = 2'-O-methylguanosine-3'-phosphate
  modified_base 18: mod_base = OTHER; note = 2'-O-methyladenosine-3'-phosphate
  modified_base 19: mod_base = OTHER; note = 2'-O-methyladenosine-3'-phosphate
  modified_base 20: mod_base = OTHER; note = 2'-O-methylcytidine-3'-phosphate
  modified_base 21: mod_base = OTHER; note = 2'-O-methyluridine-3'-phosphorothioate
  modified_base 22: mod_base = OTHER; note = 2'-O-methylguanosine-3'-phosphorothioate
  modified_base 23: mod_base = OTHER; note = 2'-O-methyladenosine
acagtagtctttcagggaactga

SEQ ID NO: 721 - RNA, 23 nt, synthetic construct
  source 1..23: mol_type = other RNA
  modified_base 1: mod_base = OTHER; note = 2'-O-methyladenosine-3'-phosphorothioate
  modified_base 2: mod_base = OTHER; note = 2'-deoxy-2'-fluoroguanosine-3'-phosphorothioate
  modified_base 3: mod_base = OTHER; note = 2'-O-methylcytidine-3'-phosphate
  modified_base 4: mod_base = OTHER; note = 2'-O-methyluridine-3'-phosphate
  modified_base 5: mod_base = OTHER; note = 2'-O-methyluridine-3'-phosphate
  modified_base 6: mod_base = OTHER; note = 2'-O-methylcytidine-3'-phosphate
  modified_base 7: mod_base = OTHER; note = Thymidine-glycol nucleic acid (GNA), S-Isomer
  modified_base 8: mod_base = OTHER; note = 2'-O-methyluridine-3'-phosphate
  modified_base 9: mod_base = OTHER; note = 2'-O-methylguanosine-3'-phosphate
  modified_base 10: mod_base = OTHER; note = 2'-O-methyluridine-3'-phosphate
  modified_base 11: mod_base = OTHER; note = 2'-O-methylcytidine-3'-phosphate
  modified_base 12: mod_base = OTHER; note = 2'-O-methylcytidine-3'-phosphate
  modified_base 13: mod_base = OTHER; note = 2'-O-methyladenosine-3'-phosphate
  modified_base 14: mod_base = OTHER; note = 2'-deoxy-2'-fluoroguanosine-3'-phosphate
  modified_base 15: mod_base = OTHER; note = 2'-O-methylcytidine-3'-phosphate
  modified_base 16: mod_base = OTHER; note = 2'-deoxy-2'-fluorouridine-3'-phosphate
  modified_base 17: mod_base = OTHER; note = 2'-O-methyluridine-3'-phosphate
  modified_base 18: mod_base = OTHER; note = 2'-O-methyluridine-3'-phosphate
  modified_base 19: mod_base = OTHER; note = 2'-O-methyladenosine-3'-phosphate
  modified_base 20: mod_base = OTHER; note = 2'-O-methyluridine-3'-phosphate
  modified_base 21: mod_base = OTHER; note = 2'-O-methyluridine-3'-phosphorothioate
  modified_base 22: mod_base = OTHER; note = 2'-O-methylguanosine-3'-phosphorothioate
  modified_base 23: mod_base = OTHER; note = 2'-O-methylguanosine
agcttcttgtccagctttattgg

SEQ ID NO: 722 - RNA, 21 nt, synthetic construct
  source 1..21: mol_type = other RNA
  modified_base 1: mod_base = OTHER; note = 2'-O-methylguanosine-3'-phosphorothioate
  modified_base 2: mod_base = OTHER; note = 2'-O-methyluridine-3'-phosphorothioate
  modified_base 3: mod_base = OTHER; note = 2'-O-methyluridine-3'-phosphate
  modified_base 4: mod_base = OTHER; note = 2'-O-methylguanosine-3'-phosphate
  modified_base 5: mod_base = OTHER; note = 2'-O-methylcytidine-3'-phosphate
  modified_base 6: mod_base = OTHER; note = 2'-O-methyluridine-3'-phosphate
  modified_base 7: mod_base = OTHER; note = 2'-deoxy-2'-fluorouridine-3'-phosphate
  modified_base 8: mod_base = OTHER; note = 2'-O-methyladenosine-3'-phosphate
  modified_base 9: mod_base = OTHER; note = 2'-deoxy-2'-fluoroadenosine-3'-phosphate
  modified_base 10: mod_base = OTHER; note = 2'-deoxy-2'-fluoroadenosine-3'-phosphate
  modified_base 11: mod_base = OTHER; note = 2'-deoxy-2'-fluoroadenosine-3'-phosphate
  modified_base 12: mod_base = OTHER; note = 2'-O-methylguanosine-3'-phosphate
  modified_base 13: mod_base = OTHER; note = 2'-O-methylguanosine-3'-phosphate
  modified_base 14: mod_base = OTHER; note = 2'-O-methylguanosine-3'-phosphate
  modified_base 15: mod_base = OTHER; note = 2'-O-methyladenosine-3'-phosphate
  modified_base 16: mod_base = OTHER; note = 2'-O-methylcytidine-3'-phosphate
  modified_base 17: mod_base = OTHER; note = 2'-O-methyladenosine-3'-phosphate
  modified_base 18: mod_base = OTHER; note = 2'-O-methylguanosine-3'-phosphate
  modified_base 19: mod_base = OTHER; note = 2'-O-methyluridine-3'-phosphate
  modified_base 20: mod_base = OTHER; note = 2'-O-methyladenosine-3'-phosphate
  modified_base 21: mod_base = OTHER; note = 2'-O-methyluridine-3'-phosphate ((2S,4R)-1-[29-[[2-(acetylamino)-2-deoxy-beta-D-galactopyra nosyl]oxy]-14,14-bis[[3-[[3-[[5-[[2-(acetylamino)-2-deoxy-b eta-D-galactopyranosyl]oxy]-1-oxopentyl]amino]propyl]amino] -3-oxopropoxy]methyl]-1,12,19,25-tetraoxo-16-oxa-13,20,24-t riazanonacos-1-yl]-4-hydroxy-2-pyrrolidinyl)methyl ester
gttgcttaaaagggacagtat

SEQ ID NO: 723 - RNA, 23 nt, synthetic construct
  source 1..23: mol_type = other RNA
  modified_base 1: mod_base = OTHER; note = 2'-O-methyladenosine-3'-phosphorothioate
  modified_base 2: mod_base = OTHER; note = 2'-deoxy-2'-fluoroadenosine-3'-phosphorothioate
  modified_base 3: mod_base = OTHER; note = 2'-O-methylcytidine-3'-phosphate
  modified_base 4: mod_base = OTHER; note = 2'-O-methyluridine-3'-phosphate
  modified_base 5: mod_base = OTHER; note = 2'-O-methyluridine-3'-phosphate
  modified_base 6: mod_base = OTHER; note = 2'-O-methylguanosine-3'-phosphate
  modified_base 7: mod_base = OTHER; note = Thymidine-glycol nucleic acid (GNA), S-Isomer
  modified_base 8: mod_base = OTHER; note = 2'-O-methylcytidine-3'-phosphate
  modified_base 9: mod_base = OTHER; note = 2'-O-methylcytidine-3'-phosphate
  modified_base 10: mod_base = OTHER; note = 2'-O-methyluridine-3'-phosphate
  modified_base 11: mod_base = OTHER; note = 2'-O-methyluridine-3'-phosphate
  modified_base 12: mod_base = OTHER; note = 2'-O-methyladenosine-3'-phosphate
  modified_base 13: mod_base = OTHER; note = 2'-O-methyladenosine-3'-phosphate
  modified_base 14: mod_base = OTHER; note = 2'-deoxy-2'-fluorocytidine-3'-phosphate
  modified_base 15: mod_base = OTHER; note = 2'-O-methylguanosine-3'-phosphate
  modified_base 16: mod_base = OTHER; note = 2'-deoxy-2'-fluoroguanosine-3'-phosphate
  modified_base 17: mod_base = OTHER; note = 2'-O-methyluridine-3'-phosphate
  modified_base 18: mod_base = OTHER; note = 2'-O-methylguanosine-3'-phosphate
  modified_base 19: mod_base = OTHER; note = 2'-O-methylcytidine-3'-phosphate
  modified_base 20: mod_base = OTHER; note = 2'-O-methyluridine-3'-phosphate
  modified_base 21: mod_base = OTHER; note = 2'-O-methylcytidine-3'-phosphorothioate
  modified_base 22: mod_base = OTHER; note = 2'-O-methylcytidine-3'-phosphorothioate
  modified_base 23: mod_base = OTHER; note = 2'-O-methyladenosine
aacttgtccttaacggtgctcca

SEQ ID NO: 724 - RNA, 23 nt, synthetic construct
  source 1..23: mol_type = other RNA
tggagcaccgttaaggacaagtt

SEQ ID NO: 725 - RNA, 23 nt, synthetic construct
  source 1..23: mol_type = other RNA
  modified_base 1: mod_base = OTHER; note = 2'-O-methyladenosine-3'-phosphorothioate
  modified_base 2: mod_base = OTHER; note = 2'-deoxy-2'-fluorocytidine-3'-phosphorothioate
  modified_base 3: mod_base = OTHER; note = 2'-O-methyluridine-3'-phosphate
  modified_base 4: mod_base = OTHER; note = 2'-O-methyluridine-3'-phosphate
  modified_base 5: mod_base = OTHER; note = 2'-O-methylcytidine-3'-phosphate
  modified_base 6: mod_base = OTHER; note = 2'-O-methyluridine-3'-phosphate
  modified_base 7: mod_base = OTHER; note = Thymidine-glycol nucleic acid (GNA), S-Isomer
  modified_base 8: mod_base = OTHER; note = 2'-O-methylguanosine-3'-phosphate
  modified_base 9: mod_base = OTHER; note = 2'-O-methyluridine-3'-phosphate
  modified_base 10: mod_base = OTHER; note = 2'-O-methylcytidine-3'-phosphate
  modified_base 11: mod_base = OTHER; note = 2'-O-methylcytidine-3'-phosphate
  modified_base 12: mod_base = OTHER; note = 2'-O-methyladenosine-3'-phosphate
  modified_base 13: mod_base = OTHER; note = 2'-O-methylguanosine-3'-phosphate
  modified_base 14: mod_base = OTHER; note = 2'-deoxy-2'-fluorocytidine-3'-phosphate
  modified_base 15: mod_base = OTHER; note = 2'-O-methyluridine-3'-phosphate
  modified_base 16: mod_base = OTHER; note = 2'-deoxy-2'-fluorouridine-3'-phosphate
  modified_base 17: mod_base = OTHER; note = 2'-O-methyluridine-3'-phosphate
  modified_base 18: mod_base = OTHER; note = 2'-O-methyladenosine-3'-phosphate
  modified_base 19: mod_base = OTHER; note = 2'-O-methyluridine-3'-phosphate
  modified_base 20: mod_base = OTHER; note = 2'-O-methyluridine-3'-phosphate
  modified_base 21: mod_base = OTHER; note = 2'-O-methylguanosine-3'-phosphorothioate
  modified_base 22: mod_base = OTHER; note = 2'-O-methylguanosine-3'-phosphorothioate
  modified_base 23: mod_base = OTHER; note = 2'-O-methylguanosine
acttcttgtccagctttattggg

SEQ ID NO: 726 - RNA, 23 nt, synthetic construct
  source 1..23: mol_type = other RNA
  modified_base 1: mod_base = OTHER; note = 2'-O-methyladenosine-3'-phosphorothioate
  modified_base 2: mod_base = OTHER; note = 2'-deoxy-2'-fluorouridine-3'-phosphorothioate
  modified_base 3: mod_base = OTHER; note = 2'-O-methylcytidine-3'-phosphate
  modified_base 4: mod_base = OTHER; note = 2'-O-methyladenosine-3'-phosphate
  modified_base 5: mod_base = OTHER; note = 2'-O-methylguanosine-3'-phosphate
  modified_base 6: mod_base = OTHER; note = 2'-O-methyluridine-3'-phosphate
  modified_base 7: mod_base = OTHER; note = Guanosine-glycol nucleic acid (GNA), S-isomer
  modified_base 8: mod_base = OTHER; note = 2'-O-methylcytidine-3'-phosphate
  modified_base 9: mod_base = OTHER; note = 2'-O-methyladenosine-3'-phosphate
  modified_base 10: mod_base = OTHER; note = 2'-O-methyluridine-3'-phosphate
  modified_base 11: mod_base = OTHER; note = 2'-O-methylcytidine-3'-phosphate
  modified_base 12: mod_base = OTHER; note = 2'-O-methylcytidine-3'-phosphate
  modified_base 13: mod_base = OTHER; note = 2'-O-methyluridine-3'-phosphate
  modified_base 14: mod_base = OTHER; note = 2'-deoxy-2'-fluorouridine-3'-phosphate
  modified_base 15: mod_base = OTHER; note = 2'-O-methylguanosine-3'-phosphate
  modified_base 16: mod_base = OTHER; note = 2'-deoxy-2'-fluoroguanosine-3'-phosphate
  modified_base 17: mod_base = OTHER; note = 2'-O-methylcytidine-3'-phosphate
  modified_base 18: mod_base = OTHER; note = 2'-O-methylguanosine-3'-phosphate
  modified_base 19: mod_base = OTHER; note = 2'-O-methylguanosine-3'-phosphate
  modified_base 20: mod_base = OTHER; note = 2'-O-methyluridine-3'-phosphate
  modified_base 21: mod_base = OTHER; note = 2'-O-methylcytidine-3'-phosphorothioate
  modified_base 22: mod_base = OTHER; note = 2'-O-methyluridine-3'-phosphorothioate
  modified_base 23: mod_base = OTHER; note = 2'-O-methyluridine
atcagtgcatccttggcggtctt

SEQ ID NO: 727 - RNA, 23 nt, synthetic construct
  source 1..23: mol_type = other RNA
  modified_base 1: mod_base = OTHER; note = 2'-O-methyladenosine-3'-phosphorothioate
  modified_base 2: mod_base = OTHER; note = 2'-deoxy-2'-fluoroguanosine-3'-phosphorothioate
  modified_base 3: mod_base = OTHER; note = 2'-O-methylcytidine-3'-phosphate
  modified_base 4: mod_base = OTHER; note = 2'-O-methyladenosine-3'-phosphate
  modified_base 5: mod_base = OTHER; note = 2'-O-methylguanosine-3'-phosphate
  modified_base 6: mod_base = OTHER; note = 2'-O-methylcytidine-3'-phosphate
  modified_base 7: mod_base = OTHER; note = Thymidine-glycol nucleic acid (GNA), S-Isomer
  modified_base 8: mod_base = OTHER; note = 2'-O-methyluridine-3'-phosphate
  modified_base 9: mod_base = OTHER; note = 2'-O-methylcytidine-3'-phosphate
  modified_base 10: mod_base = OTHER; note = 2'-O-methyluridine-3'-phosphate
  modified_base 11: mod_base = OTHER; note = 2'-O-methyluridine-3'-phosphate
  modified_base 12: mod_base = OTHER; note = 2'-O-methylguanosine-3'-phosphate
  modified_base 13: mod_base = OTHER; note = 2'-O-methyluridine-3'-phosphate
  modified_base 14: mod_base = OTHER; note = 2'-deoxy-2'-fluorocytidine-3'-phosphate
  modified_base 15: mod_base = OTHER; note = 2'-O-methylcytidine-3'-phosphate
  modified_base 16: mod_base = OTHER; note = 2'-deoxy-2'-fluoroadenosine-3'-phosphate
  modified_base 17: mod_base = OTHER; note = 2'-O-methylguanosine-3'-phosphate
  modified_base 18: mod_base = OTHER; note = 2'-O-methylcytidine-3'-phosphate
  modified_base 19: mod_base = OTHER; note = 2'-O-methyluridine-3'-phosphate
  modified_base 20: mod_base = OTHER; note = 2'-O-methyluridine-3'-phosphate
  modified_base 21: mod_base = OTHER; note = 2'-O-methyluridine-3'-phosphorothioate
  modified_base 22: mod_base = OTHER; note = 2'-O-methyladenosine-3'-phosphorothioate
  modified_base 23: mod_base = OTHER; note = 2'-O-methyluridine
agcagcttcttgtccagctttat

SEQ ID NO: 728 - RNA, 23 nt, synthetic construct
  source 1..23: mol_type = other RNA
  modified_base 1: mod_base = OTHER; note = 2'-O-methyladenosine-3'-phosphorothioate
  modified_base 2: mod_base = OTHER; note = 2'-deoxy-2'-fluorouridine-3'-phosphorothioate
  modified_base 3: mod_base = OTHER; note = 2'-O-methyladenosine-3'-phosphate
  modified_base 4: mod_base = OTHER; note = 2'-O-methylguanosine-3'-phosphate
  modified_base 5: mod_base = OTHER; note = 2'-O-methylcytidine-3'-phosphate
  modified_base 6: mod_base = OTHER; note = 2'-O-methyladenosine-3'-phosphate
  modified_base 7: mod_base = OTHER; note = Guanosine-glycol nucleic acid (GNA), S-isomer
  modified_base 8: mod_base = OTHER; note = 2'-O-methylcytidine-3'-phosphate
  modified_base 9: mod_base = OTHER; note = 2'-O-methyluridine-3'-phosphate
  modified_base 10: mod_base = OTHER; note = 2'-O-methyluridine-3'-phosphate
  modified_base 11: mod_base = OTHER; note = 2'-O-methylcytidine-3'-phosphate
  modified_base 12: mod_base = OTHER; note = 2'-O-methyluridine-3'-phosphate
  modified_base 13: mod_base = OTHER; note = 2'-O-methyluridine-3'-phosphate
  modified_base 14: mod_base = OTHER; note = 2'-deoxy-2'-fluoroguanosine-3'-phosphate
  modified_base 15: mod_base = OTHER; note = 2'-O-methyluridine-3'-phosphate
  modified_base 16: mod_base = OTHER; note = 2'-deoxy-2'-fluorocytidine-3'-phosphate
  modified_base 17: mod_base = OTHER; note = 2'-O-methylcytidine-3'-phosphate
  modified_base 18: mod_base = OTHER; note = 2'-O-methyladenosine-3'-phosphate
  modified_base 19: mod_base = OTHER; note = 2'-O-methylguanosine-3'-phosphate
  modified_base 20: mod_base = OTHER; note = 2'-O-methylcytidine-3'-phosphate
  modified_base 21: mod_base = OTHER; note = 2'-O-methyluridine-3'-phosphorothioate
  modified_base 22: mod_base = OTHER; note = 2'-O-methyluridine-3'-phosphorothioate
  modified_base 23: mod_base = OTHER; note = 2'-O-methyluridine
atagcagcttcttgtccagcttt

SEQ ID NO: 729 - RNA, 23 nt, synthetic construct
  source 1..23: mol_type = other RNA
tatagcagcttcttgtccagctt

SEQ ID NO: 730 - RNA, 23 nt, synthetic construct
  source 1..23: mol_type = other RNA
  modified_base 1: mod_base = OTHER; note = 2'-O-methyladenosine-3'-phosphorothioate
  modified_base 2: mod_base = OTHER; note = 2'-deoxy-2'-fluorocytidine-3'-phosphorothioate
  modified_base 3: mod_base = OTHER; note = 2'-O-methyluridine-3'-phosphate
  modified_base 4: mod_base = OTHER; note = 2'-O-methylguanosine-3'-phosphate
  modified_base 5: mod_base = OTHER; note = 2'-O-methylcytidine-3'-phosphate
  modified_base 6: mod_base = OTHER; note = 2'-O-methylcytidine-3'-phosphate
  modified_base 7: mod_base = OTHER; note = Thymidine-glycol nucleic acid (GNA), S-Isomer
  modified_base 8: mod_base = OTHER; note = 2'-O-methylcytidine-3'-phosphate
  modified_base 9: mod_base = OTHER; note = 2'-O-methyluridine-3'-phosphate
  modified_base 10: mod_base = OTHER; note = 2'-O-methyladenosine-3'-phosphate
  modified_base 11: mod_base = OTHER; note = 2'-O-methylguanosine-3'-phosphate
  modified_base 12: mod_base = OTHER; note = 2'-O-methylguanosine-3'-phosphate
  modified_base 13: mod_base = OTHER; note = 2'-O-methylguanosine-3'-phosphate
  modified_base 14: mod_base = OTHER; note = 2'-deoxy-2'-fluoroadenosine-3'-phosphate
  modified_base 15: mod_base = OTHER; note = 2'-O-methyluridine-3'-phosphate
  modified_base 16: mod_base = OTHER; note = 2'-deoxy-2'-fluoroguanosine-3'-phosphate
  modified_base 17: mod_base = OTHER; note = 2'-O-methyladenosine-3'-phosphate
  modified_base 18: mod_base = OTHER; note = 2'-O-methyladenosine-3'-phosphate
  modified_base 19: mod_base = OTHER; note = 2'-O-methylcytidine-3'-phosphate
  modified_base 20: mod_base = OTHER; note = 2'-O-methyluridine-3'-phosphate
  modified_base 21: mod_base = OTHER; note = 2'-O-methylguanosine-3'-phosphorothioate
  modified_base 22: mod_base = OTHER; note = 2'-O-methyladenosine-3'-phosphorothioate
  modified_base 23: mod_base = OTHER; note = 2'-O-methylguanosine
actgcctctagggatgaactgag

SEQ ID NO: 731 - RNA, 23 nt, synthetic construct
  source 1..23: mol_type = other RNA
  modified_base 1: mod_base = OTHER; note = 2'-O-methyladenosine-3'-phosphorothioate
  modified_base 2: mod_base = OTHER; note = 2'-deoxy-2'-fluorouridine-3'-phosphorothioate
  modified_base 3: mod_base = OTHER; note = 2'-O-methyladenosine-3'-phosphate
  modified_base 4: mod_base = OTHER; note = 2'-O-methyladenosine-3'-phosphate
  modified_base 5: mod_base = OTHER; note = 2'-O-methylcytidine-3'-phosphate
  modified_base 6: mod_base = OTHER; note = 2'-O-methylguanosine-3'-phosphate
  modified_base 7: mod_base = OTHER; note = Guanosine-glycol nucleic acid (GNA), S-isomer
  modified_base 8: mod_base = OTHER; note = 2'-O-methyluridine-3'-phosphate
  modified_base 9: mod_base = OTHER; note = 2'-O-methylguanosine-3'-phosphate
  modified_base 10: mod_base = OTHER; note = 2'-O-methylcytidine-3'-phosphate
  modified_base 11: mod_base = OTHER; note = 2'-O-methyluridine-3'-phosphate
  modified_base 12: mod_base = OTHER; note = 2'-O-methylcytidine-3'-phosphate
  modified_base 13: mod_base = OTHER; note = 2'-O-methylcytidine-3'-phosphate
  modified_base 14: mod_base = OTHER; note = 2'-deoxy-2'-fluoroadenosine-3'-phosphate
  modified_base 15: mod_base = OTHER; note = 2'-O-methylguanosine-3'-phosphate
  modified_base 16: mod_base = OTHER; note = 2'-deoxy-2'-fluorouridine-3'-phosphate
  modified_base 17: mod_base = OTHER; note = 2'-O-methyladenosine-3'-phosphate
  modified_base 18: mod_base = OTHER; note = 2'-O-methylguanosine-3'-phosphate
  modified_base 19: mod_base = OTHER; note = 2'-O-methyluridine-3'-phosphate
  modified_base 20: mod_base = OTHER; note = 2'-O-methylcytidine-3'-phosphate
  modified_base 21: mod_base = OTHER; note = 2'-O-methyluridine-3'-phosphorothioate
  modified_base 22: mod_base = OTHER; note = 2'-O-methyluridine-3'-phosphorothioate
  modified_base 23: mod_base = OTHER; note = 2'-O-methyluridine
ataacggtgctccagtagtcttt

SEQ ID NO: 732 - RNA, 23 nt, synthetic construct
  source 1..23: mol_type = other RNA
  modified_base 1: mod_base = OTHER; note = 2'-O-methyladenosine-3'-phosphorothioate
  modified_base 2: mod_base = OTHER; note = 2'-deoxy-2'-fluorouridine-3'-phosphorothioate
  modified_base 3: mod_base = OTHER; note = 2'-O-methylguanosine-3'-phosphate
  modified_base 4: mod_base = OTHER; note = 2'-O-methyluridine-3'-phosphate
  modified_base 5: mod_base = OTHER; note = 2'-O-methyluridine-3'-phosphate
  modified_base 6: mod_base = OTHER; note = 2'-O-methylcytidine-3'-phosphate
  modified_base 7: mod_base = OTHER; note = Cytidine-glycol nucleic acid (GNA), S-isomer
  modified_base 8: mod_base = OTHER; note = 2'-O-methyluridine-3'-phosphate
  modified_base 9: mod_base = OTHER; note = 2'-O-methylguanosine-3'-phosphate
  modified_base 10: mod_base = OTHER; note = 2'-O-methylguanosine-3'-phosphate
  modified_base 11: mod_base = OTHER; note = 2'-O-methyladenosine-3'-phosphate
  modified_base 12: mod_base = OTHER; note = 2'-O-methylguanosine-3'-phosphate
  modified_base 13: mod_base = OTHER; note = 2'-O-methylcytidine-3'-phosphate
  modified_base 14: mod_base = OTHER; note = 2'-deoxy-2'-fluoroadenosine-3'-phosphate
  modified_base 15: mod_base = OTHER; note = 2'-O-methylguanosine-3'-phosphate
  modified_base 16: mod_base = OTHER; note = 2'-deoxy-2'-fluorocytidine-3'-phosphate
  modified_base 17: mod_base = OTHER; note = 2'-O-methyluridine-3'-phosphate
  modified_base 18: mod_base = OTHER; note = 2'-O-methylguanosine-3'-phosphate
  modified_base 19: mod_base = OTHER; note = 2'-O-methylcytidine-3'-phosphate
  modified_base 20: mod_base = OTHER; note = 2'-O-methylcytidine-3'-phosphate
  modified_base 21: mod_base = OTHER; note = 2'-O-methyluridine-3'-phosphorothioate
  modified_base 22: mod_base = OTHER; note = 2'-O-methylcytidine-3'-phosphorothioate
  modified_base 23: mod_base = OTHER; note = 2'-O-methyluridine
atgttcctggagcagctgcctct

SEQ ID NO: 733 - RNA, 23 nt, synthetic construct
  source 1..23: mol_type = other RNA
  modified_base 1: mod_base = OTHER; note = 2'-O-methyladenosine-3'-phosphorothioate
  modified_base 2: mod_base = OTHER; note = 2'-deoxy-2'-fluorouridine-3'-phosphorothioate
  modified_base 3: mod_base = OTHER; note = 2'-O-methylcytidine-3'-phosphate
  modified_base 4: mod_base = OTHER; note = 2'-O-methyladenosine-3'-phosphate
  modified_base 5: mod_base = OTHER; note = 2'-O-methylguanosine-3'-phosphate
  modified_base 6: mod_base = OTHER; note = 2'-O-methylguanosine-3'-phosphate
  modified_base 7: mod_base = OTHER; note = Guanosine-glycol nucleic acid (GNA), S-isomer
  modified_base 8: mod_base = OTHER; note = 2'-O-methyladenosine-3'-phosphate
  modified_base 9: mod_base = OTHER; note = 2'-O-methyladenosine-3'-phosphate
  modified_base 10: mod_base = OTHER; note = 2'-O-methylcytidine-3'-phosphate
  modified_base 11: mod_base = OTHER; note = 2'-O-methyluridine-3'-phosphate
  modified_base 12: mod_base = OTHER; note = 2'-O-methylguanosine-3'-phosphate
  modified_base 13: mod_base = OTHER; note = 2'-O-methyladenosine-3'-phosphate
  modified_base 14: mod_base = OTHER; note = 2'-deoxy-2'-fluoroadenosine-3'-phosphate
  modified_base 15: mod_base = OTHER; note = 2'-O-methylguanosine-3'-phosphate
  modified_base 16: mod_base = OTHER; note = 2'-deoxy-2'-fluorocytidine-3'-phosphate
  modified_base 17: mod_base = OTHER; note = 2'-O-methylcytidine-3'-phosphate
  modified_base 18: mod_base = OTHER; note = 2'-O-methyladenosine-3'-phosphate
  modified_base 19: mod_base = OTHER; note = 2'-O-methyluridine-3'-phosphate
  modified_base 20: mod_base = OTHER; note = 2'-O-methylcytidine-3'-phosphate
  modified_base 21: mod_base = OTHER; note = 2'-O-methylguanosine-3'-phosphorothioate
  modified_base 22: mod_base = OTHER; note = 2'-O-methylguanosine-3'-phosphorothioate
  modified_base 23: mod_base = OTHER; note = 2'-O-methyluridine
atcagggaactgaagccatcggt

SEQ ID NO: 734 - RNA, 23 nt, synthetic construct
  source 1..23: mol_type = other RNA
  modified_base 1: mod_base = OTHER; note = 2'-O-methyladenosine-3'-phosphorothioate
  modified_base 2: mod_base = OTHER; note = 2'-deoxy-2'-fluorocytidine-3'-phosphorothioate
  modified_base 3: mod_base = OTHER; note = 2'-O-methyluridine-3'-phosphate
  modified_base 4: mod_base = OTHER; note = 2'-O-methyluridine-3'-phosphate
  modified_base 5: mod_base = OTHER; note = 2'-O-methylguanosine-3'-phosphate
  modified_base 6: mod_base = OTHER; note = 2'-O-methyluridine-3'-phosphate
  modified_base 7: mod_base = OTHER; note = Cytidine-glycol nucleic acid (GNA), S-isomer
  modified_base 8: mod_base = OTHER; note = 2'-O-methylcytidine-3'-phosphate
  modified_base 9: mod_base = OTHER; note = 2'-O-methyladenosine-3'-phosphate
  modified_base 10: mod_base = OTHER; note = 2'-O-methylguanosine-3'-phosphate
  modified_base 11: mod_base = OTHER; note = 2'-O-methylcytidine-3'-phosphate
  modified_base 12: mod_base = OTHER; note = 2'-O-methyluridine-3'-phosphate
  modified_base 13: mod_base = OTHER; note = 2'-O-methyluridine-3'-phosphate
  modified_base 14: mod_base = OTHER; note = 2'-deoxy-2'-fluorouridine-3'-phosphate
  modified_base 15: mod_base = OTHER; note = 2'-O-methyladenosine-3'-phosphate
  modified_base 16: mod_base = OTHER; note = 2'-deoxy-2'-fluorouridine-3'-phosphate
  modified_base 17: mod_base = OTHER; note = 2'-O-methyluridine-3'-phosphate
  modified_base 18: mod_base = OTHER; note = 2'-O-methylguanosine-3'-phosphate
  modified_base 19: mod_base = OTHER; note = 2'-O-methylguanosine-3'-phosphate
  modified_base 20: mod_base = OTHER; note = 2'-O-methylguanosine-3'-phosphate
  modified_base 21: mod_base = OTHER; note = 2'-O-methyladenosine-3'-phosphorothioate
  modified_base 22: mod_base = OTHER; note = 2'-O-methylguanosine-3'-phosphorothioate
  modified_base 23: mod_base = OTHER; note = 2'-O-methylguanosine
acttgtccagctttattgggagg

SEQ ID NO: 735 - RNA, 23 nt, synthetic construct
  source 1..23: mol_type = other RNA
  modified_base 1: mod_base = OTHER; note = 2'-O-methyladenosine-3'-phosphorothioate
  modified_base 2: mod_base = OTHER; note = 2'-deoxy-2'-fluorocytidine-3'-phosphorothioate
  modified_base 3: mod_base = OTHER; note = 2'-O-methyladenosine-3'-phosphate
  modified_base 4: mod_base = OTHER; note = 2'-O-methylguanosine-3'-phosphate
  modified_base 5: mod_base = OTHER; note = 2'-O-methylcytidine-3'-phosphate
  modified_base 6: mod_base = OTHER; note = 2'-O-methyluridine-3'-phosphate
  modified_base 7: mod_base = OTHER; note = Thymidine-glycol nucleic acid (GNA), S-Isomer
  modified_base 8: mod_base = OTHER; note = 2'-O-methylcytidine-3'-phosphate
  modified_base 9: mod_base = OTHER; note = 2'-O-methyluridine-3'-phosphate
  modified_base 10: mod_base = OTHER; note = 2'-O-methyluridine-3'-phosphate
  modified_base 11: mod_base = OTHER; note = 2'-O-methylguanosine-3'-phosphate
  modified_base 12: mod_base = OTHER; note = 2'-O-methyluridine-3'-phosphate
  modified_base 13: mod_base = OTHER; note = 2'-O-methylcytidine-3'-phosphate
  modified_base 14: mod_base = OTHER; note = 2'-deoxy-2'-fluorocytidine-3'-phosphate
  modified_base 15: mod_base = OTHER; note = 2'-O-methyladenosine-3'-phosphate
  modified_base 16: mod_base = OTHER; note = 2'-deoxy-2'-fluoroguanosine-3'-phosphate
  modified_base 17: mod_base = OTHER; note = 2'-O-methylcytidine-3'-phosphate
  modified_base 18: mod_base = OTHER; note = 2'-O-methyluridine-3'-phosphate
  modified_base 19: mod_base = OTHER; note = 2'-O-methyluridine-3'-phosphate
  modified_base 20: mod_base = OTHER; note = 2'-O-methyluridine-3'-phosphate
  modified_base 21: mod_base = OTHER; note = 2'-O-methyladenosine-3'-phosphorothioate
  modified_base 22: mod_base = OTHER; note = 2'-O-methyluridine-3'-phosphorothioate
  modified_base 23: mod_base = OTHER; note = 2'-O-methyluridine
acagcttcttgtccagctttatt

SEQ ID NO: 736 - RNA, 23 nt, synthetic construct
  source 1..23: mol_type = other RNA
  modified_base 1: mod_base = OTHER; note = 2'-O-methyladenosine-3'-phosphorothioate
  modified_base 2: mod_base = OTHER; note = 2'-deoxy-2'-fluorouridine-3'-phosphorothioate
  modified_base 3: mod_base = OTHER; note = 2'-O-methylguanosine-3'-phosphate
  modified_base 4: mod_base = OTHER; note = 2'-O-methyladenosine-3'-phosphate
  modified_base 5: mod_base = OTHER; note = 2'-O-methyladenosine-3'-phosphate
  modified_base 6: mod_base = OTHER; note = 2'-O-methylguanosine-3'-phosphate
  modified_base 7: mod_base = OTHER; note = Cytidine-glycol nucleic acid (GNA), S-isomer
  modified_base 8: mod_base = OTHER; note = 2'-O-methylcytidine-3'-phosphate
  modified_base 9: mod_base = OTHER; note = 2'-O-methyladenosine-3'-phosphate
  modified_base 10: mod_base = OTHER; note = 2'-O-methyluridine-3'-phosphate
  modified_base 11: mod_base = OTHER; note = 2'-O-methylcytidine-3'-phosphate
  modified_base 12: mod_base = OTHER; note = 2'-O-methylguanosine-3'-phosphate
  modified_base 13: mod_base = OTHER; note = 2'-O-methylguanosine-3'-phosphate
  modified_base 14: mod_base = OTHER; note = 2'-deoxy-2'-fluorouridine-3'-phosphate
  modified_base 15: mod_base = OTHER; note = 2'-O-methylcytidine-3'-phosphate
  modified_base 16: mod_base = OTHER; note = 2'-deoxy-2'-fluoroadenosine-3'-phosphate
  modified_base 17: mod_base = OTHER; note = 2'-O-methylcytidine-3'-phosphate
  modified_base 18: mod_base = OTHER; note = 2'-O-methylcytidine-3'-phosphate
  modified_base 19: mod_base = OTHER; note = 2'-O-methylcytidine-3'-phosphate
  modified_base 20: mod_base = OTHER; note = 2'-O-methyladenosine-3'-phosphate
  modified_base 21: mod_base = OTHER; note = 2'-O-methylguanosine-3'-phosphorothioate
  modified_base 22: mod_base = OTHER; note = 2'-O-methylcytidine-3'-phosphorothioate
  modified_base 23: mod_base = OTHER; note = 2'-O-methylcytidine
atgaagccatcggtcacccagcc

SEQ ID NO: 737 - RNA, 23 nt, synthetic construct
  source 1..23: mol_type = other RNA
  modified_base 1: mod_base = OTHER; note = 2'-O-methyladenosine-3'-phosphorothioate
  modified_base 2: mod_base = OTHER; note = 2'-deoxy-2'-fluoroguanosine-3'-phosphorothioate
  modified_base 3: mod_base = OTHER; note = 2'-O-methyladenosine-3'-phosphate
  modified_base 4: mod_base = OTHER; note = 2'-O-methylguanosine-3'-phosphate
  modified_base 5: mod_base = OTHER; note = 2'-O-methylcytidine-3'-phosphate
  modified_base 6: mod_base = OTHER; note = 2'-O-methyladenosine-3'-phosphate
  modified_base 7: mod_base = OTHER; note = Guanosine-glycol nucleic acid (GNA), S-isomer
  modified_base 8: mod_base = OTHER; note = 2'-O-methylcytidine-3'-phosphate
  modified_base 9: mod_base = OTHER; note = 2'-O-methyluridine-3'-phosphate
  modified_base 10: mod_base = OTHER; note = 2'-O-methylguanosine-3'-phosphate
  modified_base 11: mod_base = OTHER; note = 2'-O-methylcytidine-3'-phosphate
  modified_base 12: mod_base = OTHER; note = 2'-O-methylcytidine-3'-phosphate
  modified_base 13: mod_base = OTHER; note = 2'-O-methyluridine-3'-phosphate
  modified_base 14: mod_base = OTHER; note = 2'-deoxy-2'-fluorocytidine-3'-phosphate
  modified_base 15: mod_base = OTHER; note = 2'-O-methyluridine-3'-phosphate
  modified_base 16: mod_base = OTHER; note = 2'-deoxy-2'-fluoroadenosine-3'-phosphate
  modified_base 17: mod_base = OTHER; note = 2'-O-methylguanosine-3'-phosphate
  modified_base 18: mod_base = OTHER; note = 2'-O-methylguanosine-3'-phosphate
  modified_base 19: mod_base = OTHER; note = 2'-O-methylguanosine-3'-phosphate
  modified_base 20: mod_base = OTHER; note = 2'-O-methyladenosine-3'-phosphate
  modified_base 21: mod_base = OTHER; note = 2'-O-methyluridine-3'-phosphorothioate
  modified_base 22: mod_base = OTHER; note = 2'-O-methylguanosine-3'-phosphorothioate
  modified_base 23: mod_base = OTHER; note = 2'-O-methyladenosine
agagcagctgcctctagggatga

SEQ ID NO: 738 - RNA, 23 nt, synthetic construct
  source 1..23: mol_type = other RNA
  modified_base 1: mod_base = OTHER; note = 2'-O-methyladenosine-3'-phosphorothioate
  modified_base 2: mod_base = OTHER; note = 2'-deoxy-2'-fluorouridine-3'-phosphorothioate
  modified_base 3: mod_base = OTHER; note = 2'-O-methyluridine-3'-phosphate
  modified_base 4: mod_base = OTHER; note = 2'-O-methylguanosine-3'-phosphate
  modified_base 5: mod_base = OTHER; note = 2'-O-methyluridine-3'-phosphate
  modified_base 6: mod_base = OTHER; note = 2'-O-methylcytidine-3'-phosphate
  modified_base 7: mod_base = OTHER; note = Cytidine-glycol nucleic acid (GNA), S-isomer
  modified_base 8: mod_base = OTHER; note = 2'-O-methyladenosine-3'-phosphate
  modified_base 9: mod_base = OTHER; note = 2'-O-methylguanosine-3'-phosphate
  modified_base 10: mod_base = OTHER; note = 2'-O-methylcytidine-3'-phosphate
  modified_base 11: mod_base = OTHER; note = 2'-O-methyluridine-3'-phosphate
  modified_base 12: mod_base = OTHER; note = 2'-O-methyluridine-3'-phosphate
  modified_base 13: mod_base = OTHER; note = 2'-O-methyluridine-3'-phosphate
  modified_base 14: mod_base = OTHER; note = 2'-deoxy-2'-fluoroadenosine-3'-phosphate
  modified_base 15: mod_base = OTHER; note = 2'-O-methyluridine-3'-phosphate
  modified_base 16: mod_base = OTHER; note = 2'-deoxy-2'-fluorouridine-3'-phosphate
  modified_base 17: mod_base = OTHER; note = 2'-O-methylguanosine-3'-phosphate
  modified_base 18: mod_base = OTHER; note = 2'-O-methylguanosine-3'-phosphate
  modified_base 19: mod_base = OTHER; note = 2'-O-methylguanosine-3'-phosphate
  modified_base 20: mod_base = OTHER; note = 2'-O-methyladenosine-3'-phosphate
  modified_base 21: mod_base = OTHER; note = 2'-O-methylguanosine-3'-phosphorothioate
  modified_base 22: mod_base = OTHER; note = 2'-O-methylguanosine-3'-phosphorothioate
  modified_base 23: mod_base = OTHER; note = 2'-O-methylcytidine
attgtccagctttattgggaggc

SEQ ID NO: 739 - RNA, 23 nt, synthetic construct
  source 1..23: mol_type = other RNA
  modified_base 1: mod_base = OTHER; note = 2'-O-methyladenosine-3'-phosphorothioate
  modified_base 2: mod_base = OTHER; note = 2'-deoxy-2'-fluoroadenosine-3'-phosphorothioate
  modified_base 3: mod_base = OTHER; note = 2'-O-methylcytidine-3'-phosphate
  modified_base 4: mod_base = OTHER; note = 2'-O-methyluridine-3'-phosphate
  modified_base 5: mod_base = OTHER; note = 2'-O-methylguanosine-3'-phosphate
  modified_base 6: mod_base = OTHER; note = 2'-O-methyladenosine-3'-phosphate
  modified_base 7: mod_base = OTHER; note = Guanosine-glycol nucleic acid (GNA), S-isomer
  modified_base 8: mod_base = OTHER; note = 2'-O-methyladenosine-3'-phosphate
  modified_base 9: mod_base = OTHER; note = 2'-O-methyladenosine-3'-phosphate
  modified_base 10: mod_base = OTHER; note = 2'-O-methyluridine-3'-phosphate
  modified_base 11: mod_base = OTHER; note = 2'-O-methyladenosine-3'-phosphate
  modified_base 12: mod_base = OTHER; note = 2'-O-methylcytidine-3'-phosphate
  modified_base 13: mod_base = OTHER; note = 2'-O-methyluridine-3'-phosphate
  modified_base 14: mod_base = OTHER; note = 2'-deoxy-2'-fluoroguanosine-3'-phosphate
  modified_base 15: mod_base = OTHER; note = 2'-O-methyluridine-3'-phosphate
  modified_base 16: mod_base = OTHER; note = 2'-deoxy-2'-fluorocytidine-3'-phosphate
  modified_base 17: mod_base = OTHER; note = 2'-O-methylcytidine-3'-phosphate
  modified_base 18: mod_base = OTHER; note = 2'-O-methylcytidine-3'-phosphate
  modified_base 19: mod_base = OTHER; note = 2'-O-methyluridine-3'-phosphate
  modified_base 20: mod_base = OTHER; note = 2'-O-methyluridine-3'-phosphate
  modified_base 21: mod_base = OTHER; note = 2'-O-methyluridine-3'-phosphorothioate
  modified_base 22: mod_base = OTHER; note = 2'-O-methyluridine-3'-phosphorothioate
  modified_base 23: mod_base = OTHER; note = 2'-O-methyladenosine
aactgagaatactgtccctttta

SEQ ID NO: 740 - RNA, 23 nt, synthetic construct
  source 1..23: mol_type = other RNA
  modified_base 1: mod_base = OTHER; note = 2'-O-methyladenosine-3'-phosphorothioate
  modified_base 2: mod_base = OTHER; note = 2'-deoxy-2'-fluoroguanosine-3'-phosphorothioate
  modified_base 3: mod_base = OTHER; note = 2'-O-methyluridine-3'-phosphate
  modified_base 4: mod_base = OTHER; note = 2'-O-methylguanosine-3'-phosphate
  modified_base 5: mod_base = OTHER; note = 2'-O-methylcytidine-3'-phosphate
  modified_base 6: mod_base = OTHER; note = 2'-O-methyluridine-3'-phosphate
  modified_base 7: mod_base = OTHER; note = Cytidine-glycol nucleic acid (GNA), S-isomer
  modified_base 8: mod_base = OTHER; note = 2'-O-methylcytidine-3'-phosphate
  modified_base 9: mod_base = OTHER; note = 2'-O-methyladenosine-3'-phosphate
  modified_base 10: mod_base = OTHER; note = 2'-O-methylguanosine-3'-phosphate
  modified_base 11: mod_base = OTHER; note = 2'-O-methyluridine-3'-phosphate
  modified_base 12: mod_base = OTHER; note = 2'-O-methyladenosine-3'-phosphate
  modified_base 13: mod_base = OTHER; note = 2'-O-methylguanosine-3'-phosphate
  modified_base 14: mod_base = OTHER; note = 2'-deoxy-2'-fluorouridine-3'-phosphate
  modified_base 15: mod_base = OTHER; note = 2'-O-methylcytidine-3'-phosphate
  modified_base 16: mod_base = OTHER; note = 2'-deoxy-2'-fluorouridine-3'-phosphate
  modified_base 17: mod_base = OTHER; note = 2'-O-methyluridine-3'-phosphate
  modified_base 18: mod_base = OTHER; note = 2'-O-methyluridine-3'-phosphate
  modified_base 19: mod_base = OTHER; note = 2'-O-methylcytidine-3'-phosphate
  modified_base 20: mod_base = OTHER; note = 2'-O-methyladenosine-3'-phosphate
  modified_base 21: mod_base = OTHER; note = 2'-O-methylguanosine-3'-phosphorothioate
  modified_base 22: mod_base = OTHER; note = 2'-O-methylguanosine-3'-phosphorothioate
  modified_base 23: mod_base = OTHER; note = 2'-O-methylguanosine
agtgctccagtagtctttcaggg

SEQ ID NO: 741 - RNA, 21 nt, synthetic construct
  source 1..21: mol_type = other RNA
  modified_base 1: mod_base = OTHER; note = 2'-O-methylguanosine-3'-phosphorothioate
  modified_base 2: mod_base = OTHER; note = 2'-O-methyladenosine-3'-phosphorothioate
  modified_base 3: mod_base = OTHER; note = 2'-O-methylguanosine-3'-phosphate
  modified_base 4: mod_base = OTHER; note = 2'-O-methylcytidine-3'-phosphate
  modified_base 5: mod_base = OTHER; note = 2'-O-methyladenosine-3'-phosphate
  modified_base 6: mod_base = OTHER; note = 2'-O-methylcytidine-3'-phosphate
  modified_base 7: mod_base = OTHER; note = 2'-deoxy-2'-fluorocytidine-3'-phosphate
  modified_base 8: mod_base = OTHER; note = 2'-O-methylguanosine-3'-phosphate
  modified_base 9: mod_base = OTHER; note = 2'-deoxy-2'-fluorouridine-3'-phosphate
  modified_base 10: mod_base = OTHER; note = 2'-deoxy-2'-fluorouridine-3'-phosphate
  modified_base 11: mod_base = OTHER; note = 2'-deoxy-2'-fluoroadenosine-3'-phosphate
  modified_base 12: mod_base = OTHER; note = 2'-O-methyladenosine-3'-phosphate
  modified_base 13: mod_base = OTHER; note = 2'-O-methylguanosine-3'-phosphate
  modified_base 14: mod_base = OTHER; note = 2'-O-methylguanosine-3'-phosphate
  modified_base 15: mod_base = OTHER; note = 2'-O-methyladenosine-3'-phosphate
  modified_base 16: mod_base = OTHER; note = 2'-O-methylcytidine-3'-phosphate
  modified_base 17: mod_base = OTHER; note = 2'-O-methyladenosine-3'-phosphate
  modified_base 18: mod_base = OTHER; note = 2'-O-methyladenosine-3'-phosphate
  modified_base 19: mod_base = OTHER; note = 2'-O-methylguanosine-3'-phosphate
  modified_base 20: mod_base = OTHER; note = 2'-O-methyluridine-3'-phosphate
  modified_base 21: mod_base = OTHER; note = 2'-O-methyluridine-3'-phosphate ((2S,4R)-1-[29-[[2-(acetylamino)-2-deoxy-beta-D-galactopyra nosyl]oxy]-14,14-bis[[3-[[3-[[5-[[2-(acetylamino)-2-deoxy-b eta-D-galactopyranosyl]oxy]-1-oxopentyl]amino]propyl]amino] -3-oxopropoxy]methyl]-1,12,19,25-tetraoxo-16-oxa-13,20,24-t riazanonacos-1-yl]-4-hydroxy-2-pyrrolidinyl)methyl ester
gagcaccgttaaggacaagtt

SEQ ID NO: 742 - RNA, 23 nt, synthetic construct
  source 1..23: mol_type = other RNA
  modified_base 1: mod_base = OTHER; note = 2'-O-methyladenosine-3'-phosphorothioate
  modified_base 2: mod_base = OTHER; note = 2'-deoxy-2'-fluoroadenosine-3'-phosphorothioate
  modified_base 3: mod_base = OTHER; note = 2'-O-methyladenosine-3'-phosphate
  modified_base 4: mod_base = OTHER; note = 2'-O-methyluridine-3'-phosphate
  modified_base 5: mod_base = OTHER; note = 2'-O-methyladenosine-3'-phosphate
  modified_base 6: mod_base = OTHER; note = 2'-O-methylcytidine-3'-phosphate
  modified_base 7: mod_base = OTHER; note = Thymidine-glycol nucleic acid (GNA), S-Isomer
  modified_base 8: mod_base = OTHER; note = 2'-O-methylguanosine-3'-phosphate
  modified_base 9: mod_base = OTHER; note = 2'-O-methyluridine-3'-phosphate
  modified_base 10: mod_base = OTHER; note = 2'-O-methylcytidine-3'-phosphate
  modified_base 11: mod_base = OTHER; note = 2'-O-methylcytidine-3'-phosphate
  modified_base 12: mod_base = OTHER; note = 2'-O-methylcytidine-3'-phosphate
  modified_base 13: mod_base = OTHER; note = 2'-O-methyluridine-3'-phosphate
  modified_base 14: mod_base = OTHER; note = 2'-deoxy-2'-fluorouridine-3'-phosphate
  modified_base 15: mod_base = OTHER; note = 2'-O-methyluridine-3'-phosphate
  modified_base 16: mod_base = OTHER; note = 2'-deoxy-2'-fluorouridine-3'-phosphate
  modified_base 17: mod_base = OTHER; note = 2'-O-methyladenosine-3'-phosphate
  modified_base 18: mod_base = OTHER; note = 2'-O-methyladenosine-3'-phosphate
  modified_base 19: mod_base = OTHER; note = 2'-O-methylguanosine-3'-phosphate
  modified_base 20: mod_base = OTHER; note = 2'-O-methylcytidine-3'-phosphate
  modified_base 21: mod_base = OTHER; note = 2'-O-methyladenosine-3'-phosphorothioate
  modified_base 22: mod_base = OTHER; note = 2'-O-methyladenosine-3'-phosphorothioate
  modified_base 23: mod_base = OTHER; note = 2'-O-methylcytidine
aaatactgtcccttttaagcaac

SEQ ID NO: 743 - RNA, 23 nt, synthetic construct
  source 1..23: mol_type = other RNA
  modified_base 1: mod_base = OTHER; note = 2'-O-methyladenosine-3'-phosphorothioate
  modified_base 2: mod_base = OTHER; note = 2'-deoxy-2'-fluorocytidine-3'-phosphorothioate
  modified_base 3: mod_base = OTHER; note = 2'-O-methyluridine-3'-phosphate
  modified_base 4: mod_base = OTHER; note = 2'-O-methyluridine-3'-phosphate
  modified_base 5: mod_base = OTHER; note = 2'-O-methyluridine-3'-phosphate
  modified_base 6: mod_base = OTHER; note = 2'-O-methylcytidine-3'-phosphate
  modified_base 7: mod_base = OTHER; note = Adenosine-glycol nucleic acid (GNA), S-isomer
  modified_base 8: mod_base = OTHER; note = 2'-O-methylguanosine-3'-phosphate
  modified_base 9: mod_base = OTHER; note = 2'-O-methylguanosine-3'-phosphate
  modified_base 10: mod_base = OTHER; note = 2'-O-methylguanosine-3'-phosphate
  modified_base 11: mod_base = OTHER; note = 2'-O-methyladenosine-3'-phosphate
  modified_base 12: mod_base = OTHER; note = 2'-O-methyladenosine-3'-phosphate
  modified_base 13: mod_base = OTHER; note = 2'-O-methylcytidine-3'-phosphate
  modified_base 14: mod_base = OTHER; note = 2'-deoxy-2'-fluorouridine-3'-phosphate
  modified_base 15: mod_base = OTHER; note = 2'-O-methylguanosine-3'-phosphate
  modified_base 16: mod_base = OTHER; note = 2'-deoxy-2'-fluoroadenosine-3'-phosphate
  modified_base 17: mod_base = OTHER; note = 2'-O-methyladenosine-3'-phosphate
  modified_base 18: mod_base = OTHER; note = 2'-O-methylguanosine-3'-phosphate
  modified_base 19: mod_base = OTHER; note = 2'-O-methylcytidine-3'-phosphate
  modified_base 20: mod_base = OTHER; note = 2'-O-methylcytidine-3'-phosphate
  modified_base 21: mod_base = OTHER; note = 2'-O-methyladenosine-3'-phosphorothioate
  modified_base 22: mod_base = OTHER; note = 2'-O-methyluridine-3'-phosphorothioate
  modified_base 23: mod_base = OTHER; note = 2'-O-methylcytidine
actttcagggaactgaagccatc

SEQ ID NO: 744 - RNA, 23 nt, synthetic construct
  source 1..23: mol_type = other RNA
  modified_base 1: mod_base = OTHER; note = 2'-O-methyladenosine-3'-phosphorothioate
  modified_base 2: mod_base = OTHER; note = 2'-deoxy-2'-fluoroguanosine-3'-phosphorothioate
  modified_base 3: mod_base = OTHER; note = 2'-O-methylguanosine-3'-phosphate
  modified_base 4: mod_base = OTHER; note = 2'-O-methyluridine-3'-phosphate
  modified_base 5: mod_base = OTHER; note = 2'-O-methylguanosine-3'-phosphate
  modified_base 6: mod_base = OTHER; note = 2'-O-methylcytidine-3'-phosphate
  modified_base 7: mod_base = OTHER; note = Thymidine-glycol nucleic acid (GNA), S-Isomer
  modified_base 8: mod_base = OTHER; note = 2'-O-methylcytidine-3'-phosphate
  modified_base 9: mod_base = OTHER; note = 2'-O-methylcytidine-3'-phosphate
  modified_base 10: mod_base = OTHER; note = 2'-O-methyladenosine-3'-phosphate
  modified_base 11: mod_base = OTHER; note = 2'-O-methylguanosine-3'-phosphate
  modified_base 12: mod_base = OTHER; note = 2'-O-methyluridine-3'-phosphate
  modified_base 13: mod_base = OTHER; note = 2'-O-methyladenosine-3'-phosphate
  modified_base 14: mod_base = OTHER; note = 2'-deoxy-2'-fluoroguanosine-3'-phosphate
  modified_base 15: mod_base = OTHER; note = 2'-O-methyluridine-3'-phosphate
  modified_base 16: mod_base = OTHER; note = 2'-deoxy-2'-fluorocytidine-3'-phosphate
  modified_base 17: mod_base = OTHER; note = 2'-O-methyluridine-3'-phosphate
  modified_base 18: mod_base = OTHER; note = 2'-O-methyluridine-3'-phosphate
  modified_base 19: mod_base = OTHER; note = 2'-O-methyluridine-3'-phosphate
  modified_base 20: mod_base = OTHER; note = 2'-O-methylcytidine-3'-phosphate
  modified_base 21: mod_base = OTHER; note = 2'-O-methyladenosine-3'-phosphorothioate
  modified_base 22: mod_base = OTHER; note = 2'-O-methylguanosine-3'-phosphorothioate
  modified_base 23: mod_base = OTHER; note = 2'-O-methylguanosine
aggtgctccagtagtctttcagg

SEQ ID NO: 745 - RNA, 23 nt, synthetic construct
  source 1..23: mol_type = other RNA
  modified_base 1: mod_base = OTHER; note = 2'-O-methyladenosine-3'-phosphorothioate
  modified_base 2: mod_base = OTHER; note = 2'-deoxy-2'-fluoroguanosine-3'-phosphorothioate
  modified_base 3: mod_base = OTHER; note = 2'-O-methylguanosine-3'-phosphate
  modified_base 4: mod_base = OTHER; note = 2'-O-methyluridine-3'-phosphate
  modified_base 5: mod_base = OTHER; note = 2'-O-methyladenosine-3'-phosphate
  modified_base 6: mod_base = OTHER; note = 2'-O-methyluridine-3'-phosphate
  modified_base 7: mod_base = OTHER; note = Thymidine-glycol nucleic acid (GNA), S-Isomer
  modified_base 8: mod_base = OTHER; note = 2'-O-methylguanosine-3'-phosphate
  modified_base 9: mod_base = OTHER; note = 2'-O-methyladenosine-3'-phosphate
  modified_base 10: mod_base = OTHER; note = 2'-O-methylguanosine-3'-phosphate
  modified_base 11: mod_base = OTHER; note = 2'-O-methylguanosine-3'-phosphate
  modified_base 12: mod_base = OTHER; note = 2'-O-methyluridine-3'-phosphate
  modified_base 13: mod_base = OTHER; note = 2'-O-methylcytidine-3'-phosphate
  modified_base 14: mod_base = OTHER; note = 2'-deoxy-2'-fluorouridine-3'-phosphate
  modified_base 15: mod_base = OTHER; note = 2'-O-methylcytidine-3'-phosphate
  modified_base 16: mod_base = OTHER; note = 2'-deoxy-2'-fluoroadenosine-3'-phosphate
  modified_base 17: mod_base = OTHER; note = 2'-O-methylguanosine-3'-phosphate
  modified_base 18: mod_base = OTHER; note = 2'-O-methylguanosine-3'-phosphate
  modified_base 19: mod_base = OTHER; note = 2'-O-methylcytidine-3'-phosphate
  modified_base 20: mod_base = OTHER; note = 2'-O-methyladenosine-3'-phosphate
  modified_base 21: mod_base = OTHER; note = 2'-O-methylguanosine-3'-phosphorothioate
  modified_base 22: mod_base = OTHER; note = 2'-O-methylcytidine-3'-phosphorothioate
  modified_base 23: mod_base = OTHER; note = 2'-O-methylcytidine
aggtattgaggtctcaggcagcc

SEQ ID NO: 746 - RNA, 23 nt, synthetic construct
  source 1..23: mol_type = other RNA
  modified_base 1: mod_base = OTHER; note = 2'-O-methyladenosine-3'-phosphorothioate
  modified_base 2: mod_base = OTHER; note = 2'-deoxy-2'-fluorouridine-3'-phosphorothioate
  modified_base 3: mod_base = OTHER; note = 2'-O-methylcytidine-3'-phosphate
  modified_base 4: mod_base = OTHER; note = 2'-O-methylcytidine-3'-phosphate
  modified_base 5: mod_base = OTHER; note = 2'-O-methyluridine-3'-phosphate
  modified_base 6: mod_base = OTHER; note = 2'-O-methyluridine-3'-phosphate
  modified_base 7: mod_base = OTHER; note = Guanosine-glycol nucleic acid (GNA), S-isomer
  modified_base 8: mod_base = OTHER; note = 2'-O-methylguanosine-3'-phosphate
  modified_base 9: mod_base = OTHER; note = 2'-O-methylcytidine-3'-phosphate
  modified_base 10: mod_base = OTHER; note = 2'-O-methylguanosine-3'-phosphate
  modified_base 11: mod_base = OTHER; note = 2'-O-methylguanosine-3'-phosphate
  modified_base 12: mod_base = OTHER; note = 2'-O-methyluridine-3'-phosphate
  modified_base 13: mod_base = OTHER; note = 2'-O-methylcytidine-3'-phosphate
  modified_base 14: mod_base = OTHER; note = 2'-deoxy-2'-fluorouridine-3'-phosphate
  modified_base 15: mod_base = OTHER; note = 2'-O-methyluridine-3'-phosphate
  modified_base 16: mod_base = OTHER; note = 2'-deoxy-2'-fluoroguanosine-3'-phosphate
  modified_base 17: mod_base = OTHER; note = 2'-O-methylguanosine-3'-phosphate
  modified_base 18: mod_base = OTHER; note = 2'-O-methyluridine-3'-phosphate
  modified_base 19: mod_base = OTHER; note = 2'-O-methylguanosine-3'-phosphate
  modified_base 20: mod_base = OTHER; note = 2'-O-methylguanosine-3'-phosphate
  modified_base 21: mod_base = OTHER; note = 2'-O-methylcytidine-3'-phosphorothioate
  modified_base 22: mod_base = OTHER; note = 2'-O-methylguanosine-3'-phosphorothioate
  modified_base 23: mod_base = OTHER; note = 2'-O-methyluridine
atccttggcggtcttggtggcgt

SEQ ID NO: 747 - RNA, 23 nt, synthetic construct
  source 1..23: mol_type = other RNA
  modified_base 1: mod_base = OTHER; note = 2'-O-methyladenosine-3'-phosphorothioate
  modified_base 2: mod_base = OTHER; note = 2'-deoxy-2'-fluoroadenosine-3'-phosphorothioate
  modified_base 3: mod_base = OTHER; note = 2'-O-methyluridine-3'-phosphate
  modified_base 4: mod_base = OTHER; note = 2'-O-methylcytidine-3'-phosphate
  modified_base 5: mod_base = OTHER; note = 2'-O-methylcytidine-3'-phosphate
  modified_base 6: mod_base = OTHER; note = 2'-O-methyluridine-3'-phosphate
  modified_base 7: mod_base = OTHER; note = Thymidine-glycol nucleic acid (GNA), S-Isomer
  modified_base 8: mod_base = OTHER; note = 2'-O-methylguanosine-3'-phosphate
  modified_base 9: mod_base = OTHER; note = 2'-O-methylguanosine-3'-phosphate
  modified_base 10: mod_base = OTHER; note = 2'-O-methylcytidine-3'-phosphate
  modified_base 11: mod_base = OTHER; note = 2'-O-methylguanosine-3'-phosphate
  modified_base 12: mod_base = OTHER; note = 2'-O-methylguanosine-3'-phosphate
  modified_base 13: mod_base = OTHER; note = 2'-O-methyluridine-3'-phosphate
  modified_base 14: mod_base = OTHER; note = 2'-deoxy-2'-fluorocytidine-3'-phosphate
  modified_base 15: mod_base = OTHER; note = 2'-O-methyluridine-3'-phosphate
  modified_base 16: mod_base = OTHER; note = 2'-deoxy-2'-fluorouridine-3'-phosphate
  modified_base 17: mod_base = OTHER; note = 2'-O-methylguanosine-3'-phosphate
  modified_base 18: mod_base = OTHER; note = 2'-O-methylguanosine-3'-phosphate
  modified_base 19: mod_base = OTHER; note = 2'-O-methyluridine-3'-phosphate
  modified_base 20: mod_base = OTHER; note = 2'-O-methylguanosine-3'-phosphate
  modified_base 21: mod_base = OTHER; note = 2'-O-methylguanosine-3'-phosphorothioate
  modified_base 22: mod_base = OTHER; note = 2'-O-methylcytidine-3'-phosphorothioate
  modified_base 23: mod_base = OTHER; note = 2'-O-methylguanosine
aatccttggcggtcttggtggcg

SEQ ID NO: 748 - RNA, 23 nt, synthetic construct
  source 1..23: mol_type = other RNA
  modified_base 1: mod_base = OTHER; note = 2'-O-methyladenosine-3'-phosphorothioate
  modified_base 2: mod_base = OTHER; note = 2'-deoxy-2'-fluoroguanosine-3'-phosphorothioate
  modified_base 3: mod_base = OTHER; note = 2'-O-methylguanosine-3'-phosphate
  modified_base 4: mod_base = OTHER; note = 2'-O-methyladenosine-3'-phosphate
  modified_base 5: mod_base = OTHER; note = 2'-O-methylguanosine-3'-phosphate
  modified_base 6: mod_base = OTHER; note = 2'-O-methylcytidine-3'-phosphate
  modified_base 7: mod_base = OTHER; note = Adenosine-glycol nucleic acid (GNA), S-isomer
  modified_base 8: mod_base = OTHER; note = 2'-O-methylguanosine-3'-phosphate
  modified_base 9: mod_base = OTHER; note = 2'-O-methylcytidine-3'-phosphate
  modified_base 10: mod_base = OTHER; note = 2'-O-methyluridine-3'-phosphate
  modified_base 11: mod_base = OTHER; note = 2'-O-methylguanosine-3'-phosphate
  modified_base 12: mod_base = OTHER; note = 2'-O-methylcytidine-3'-phosphate
  modified_base 13: mod_base = OTHER; note = 2'-O-methylcytidine-3'-phosphate
  modified_base 14: mod_base = OTHER; note = 2'-deoxy-2'-fluorouridine-3'-phosphate
  modified_base 15: mod_base = OTHER; note = 2'-O-methylcytidine-3'-phosphate
  modified_base 16: mod_base = OTHER; note = 2'-deoxy-2'-fluorouridine-3'-phosphate
  modified_base 17: mod_base = OTHER; note = 2'-O-methyladenosine-3'-phosphate
  modified_base 18: mod_base = OTHER; note = 2'-O-methylguanosine-3'-phosphate
  modified_base 19: mod_base = OTHER; note = 2'-O-methylguanosine-3'-phosphate
  modified_base 20: mod_base = OTHER; note = 2'-O-methylguanosine-3'-phosphate
  modified_base 21: mod_base = OTHER; note = 2'-O-methyladenosine-3'-phosphorothioate
  modified_base 22: mod_base = OTHER; note = 2'-O-methyluridine-3'-phosphorothioate
  modified_base 23: mod_base = OTHER; note = 2'-O-methylguanosine
aggagcagctgcctctagggatg

SEQ ID NO: 749 - RNA, 23 nt, synthetic construct
  source 1..23: mol_type = other RNA
  modified_base 1: mod_base = OTHER; note = 2'-O-methyladenosine-3'-phosphorothioate
  modified_base 2: mod_base = OTHER; note = 2'-deoxy-2'-fluoroadenosine-3'-phosphorothioate
  modified_base 3: mod_base = OTHER; note = 2'-O-methylguanosine-3'-phosphate
  modified_base 4: mod_base = OTHER; note = 2'-O-methyluridine-3'-phosphate
  modified_base 5: mod_base = OTHER; note = 2'-O-methyladenosine-3'-phosphate
  modified_base 6: mod_base = OTHER; note = 2'-O-methylguanosine-3'-phosphate
  modified_base 7: mod_base = OTHER; note = Thymidine-glycol nucleic acid (GNA), S-Isomer
  modified_base 8: mod_base = OTHER; note = 2'-O-methylcytidine-3'-phosphate
  modified_base 9: mod_base = OTHER; note = 2'-O-methyluridine-3'-phosphate
  modified_base 10: mod_base = OTHER; note = 2'-O-methyluridine-3'-phosphate
  modified_base 11: mod_base = OTHER; note = 2'-O-methyluridine-3'-phosphate
  modified_base 12: mod_base = OTHER; note = 2'-O-methylcytidine-3'-phosphate
  modified_base 13: mod_base = OTHER; note = 2'-O-methyladenosine-3'-phosphate
  modified_base 14: mod_base = OTHER; note = 2'-deoxy-2'-fluoroguanosine-3'-phosphate
  modified_base 15: mod_base = OTHER; note = 2'-O-methylguanosine-3'-phosphate
  modified_base 16: mod_base = OTHER; note = 2'-deoxy-2'-fluoroguanosine-3'-phosphate
  modified_base 17: mod_base = OTHER; note = 2'-O-methyladenosine-3'-phosphate
  modified_base 18: mod_base = OTHER; note = 2'-O-methyladenosine-3'-phosphate
  modified_base 19: mod_base = OTHER; note = 2'-O-methylcytidine-3'-phosphate
  modified_base 20: mod_base = OTHER; note = 2'-O-methyluridine-3'-phosphate
  modified_base 21: mod_base = OTHER; note = 2'-O-methylguanosine-3'-phosphorothioate
  modified_base 22: mod_base = OTHER; note = 2'-O-methyladenosine-3'-phosphorothioate
  modified_base 23: mod_base = OTHER; note = 2'-O-methyladenosine
aagtagtctttcagggaactgaa

SEQ ID NO: 750 - RNA, 23 nt, synthetic construct
  source 1..23: mol_type = other RNA
  modified_base 1: mod_base = OTHER; note = 2'-O-methyladenosine-3'-phosphorothioate
  modified_base 2: mod_base = OTHER; note = 2'-deoxy-2'-fluorouridine-3'-phosphorothioate
  modified_base 3: mod_base = OTHER; note = 2'-O-methylcytidine-3'-phosphate
  modified_base 4: mod_base = OTHER; note = 2'-O-methylcytidine-3'-phosphate
  modified_base 5: mod_base = OTHER; note = 2'-O-methylcytidine-3'-phosphate
  modified_base 6: mod_base = OTHER; note = 2'-O-methyluridine-3'-phosphate
  modified_base 7: mod_base = OTHER; note = Thymidine-glycol nucleic acid (GNA), S-Isomer
  modified_base 8: mod_base = OTHER; note = 2'-O-methyluridine-3'-phosphate
  modified_base 9: mod_base = OTHER; note = 2'-O-methyluridine-3'-phosphate
  modified_base 10: mod_base = OTHER; note = 2'-O-methyladenosine-3'-phosphate
  modified_base 11: mod_base = OTHER; note = 2'-O-methyladenosine-3'-phosphate
  modified_base 12: mod_base = OTHER; note = 2'-O-methylguanosine-3'-phosphate
  modified_base 13: mod_base = OTHER; note = 2'-O-methylcytidine-3'-phosphate
  modified_base 14: mod_base = OTHER; note = 2'-deoxy-2'-fluoroadenosine-3'-phosphate
  modified_base 15: mod_base = OTHER; note = 2'-O-methyladenosine-3'-phosphate
  modified_base 16: mod_base = OTHER; note = 2'-deoxy-2'-fluorocytidine-3'-phosphate
  modified_base 17: mod_base = OTHER; note = 2'-O-methylcytidine-3'-phosphate
  modified_base 18: mod_base = OTHER; note = 2'-O-methyluridine-3'-phosphate
  modified_base 19: mod_base = OTHER; note = 2'-O-methyladenosine-3'-phosphate
  modified_base 20: mod_base = OTHER; note = 2'-O-methylcytidine-3'-phosphate
  modified_base 21: mod_base = OTHER; note = 2'-O-methyladenosine-3'-phosphorothioate
  modified_base 22: mod_base = OTHER; note = 2'-O-methylguanosine-3'-phosphorothioate
  modified_base 23: mod_base = OTHER; note = 2'-O-methylguanosine
atcccttttaagcaacctacagg

SEQ ID NO: 751 - RNA, 23 nt, synthetic construct
  source 1..23: mol_type = other RNA
  modified_base 1: mod_base = OTHER; note = 2'-O-methyladenosine-3'-phosphorothioate
  modified_base 2: mod_base = OTHER; note = 2'-deoxy-2'-fluorocytidine-3'-phosphorothioate
  modified_base 3: mod_base = OTHER; note = 2'-O-methyluridine-3'-phosphate
  modified_base 4: mod_base = OTHER; note = 2'-O-methyluridine-3'-phosphate
  modified_base 5: mod_base = OTHER; note = 2'-O-methylguanosine-3'-phosphate
  modified_base 6: mod_base = OTHER; note = 2'-O-methyluridine-3'-phosphate
  modified_base 7: mod_base = OTHER; note = Cytidine-glycol nucleic acid (GNA), S-isomer
  modified_base 8: mod_base = OTHER; note = 2'-O-methylcytidine-3'-phosphate
  modified_base 9: mod_base = OTHER; note = 2'-O-methyluridine-3'-phosphate
  modified_base 10: mod_base = OTHER; note = 2'-O-methyluridine-3'-phosphate
  modified_base 11: mod_base = OTHER; note = 2'-O-methyladenosine-3'-phosphate
  modified_base 12: mod_base = OTHER; note = 2'-O-methyladenosine-3'-phosphate
  modified_base 13: mod_base = OTHER; note = 2'-O-methylcytidine-3'-phosphate
  modified_base 14: mod_base = OTHER; note = 2'-deoxy-2'-fluoroguanosine-3'-phosphate
  modified_base 15: mod_base = OTHER; note = 2'-O-methylguanosine-3'-phosphate
  modified_base 16: mod_base = OTHER; note = 2'-deoxy-2'-fluorouridine-3'-phosphate
  modified_base 17: mod_base = OTHER; note = 2'-O-methylguanosine-3'-phosphate
  modified_base 18: mod_base = OTHER; note = 2'-O-methylcytidine-3'-phosphate
  modified_base 19: mod_base = OTHER; note = 2'-O-methyluridine-3'-phosphate
  modified_base 20: mod_base = OTHER; note = 2'-O-methylcytidine-3'-phosphate
  modified_base 21: mod_base = OTHER; note = 2'-O-methylcytidine-3'-phosphorothioate
  modified_base 22: mod_base = OTHER; note = 2'-O-methyladenosine-3'-phosphorothioate
  modified_base 23: mod_base = OTHER; note = 2'-O-methylguanosine
acttgtccttaacggtgctccag

SEQ ID NO: 752 - RNA, 23 nt, synthetic construct
  source 1..23: mol_type = other RNA
  modified_base 1: mod_base = OTHER; note = 2'-O-methyladenosine-3'-phosphorothioate
  modified_base 2: mod_base = OTHER; note = 2'-deoxy-2'-fluoroadenosine-3'-phosphorothioate
  modified_base 3: mod_base = OTHER; note = 2'-O-methyladenosine-3'-phosphate
  modified_base 4: mod_base = OTHER; note = 2'-O-methylcytidine-3'-phosphate
  modified_base 5: mod_base = OTHER; note = 2'-O-methylguanosine-3'-phosphate
  modified_base 6: mod_base = OTHER; note = 2'-O-methylguanosine-3'-phosphate
  modified_base 7: mod_base = OTHER; note = Thymidine-glycol nucleic acid (GNA), S-Isomer
  modified_base 8: mod_base = OTHER; note = 2'-O-methylguanosine-3'-phosphate
  modified_base 9: mod_base = OTHER; note = 2'-O-methylcytidine-3'-phosphate
  modified_base 10: mod_base = OTHER; note = 2'-O-methyluridine-3'-phosphate
  modified_base 11: mod_base = OTHER; note = 2'-O-methylcytidine-3'-phosphate
  modified_base 12: mod_base = OTHER; note = 2'-O-methylcytidine-3'-phosphate
  modified_base 13: mod_base = OTHER; note = 2'-O-methyladenosine-3'-phosphate
  modified_base 14: mod_base = OTHER; note = 2'-deoxy-2'-fluoroguanosine-3'-phosphate
  modified_base 15: mod_base = OTHER; note = 2'-O-methyluridine-3'-phosphate
  modified_base 16: mod_base = OTHER; note = 2'-deoxy-2'-fluoroadenosine-3'-phosphate
  modified_base 17: mod_base = OTHER; note = 2'-O-methylguanosine-3'-phosphate
  modified_base 18: mod_base = OTHER; note = 2'-O-methyluridine-3'-phosphate
  modified_base 19: mod_base = OTHER; note = 2'-O-methylcytidine-3'-phosphate
  modified_base 20: mod_base = OTHER; note = 2'-O-methyluridine-3'-phosphate
  modified_base 21: mod_base = OTHER; note = 2'-O-methyluridine-3'-phosphorothioate
  modified_base 22: mod_base = OTHER; note = 2'-O-methyluridine-3'-phosphorothioate
  modified_base 23: mod_base = OTHER; note = 2'-O-methylcytidine
aaacggtgctccagtagtctttc

SEQ ID NO: 753 - RNA, 23 nt, synthetic construct
  source 1..23: mol_type = other RNA
  modified_base 1: mod_base = OTHER; note = 2'-O-methyladenosine-3'-phosphorothioate
  modified_base 2: mod_base = OTHER; note = 2'-deoxy-2'-fluoroguanosine-3'-phosphorothioate
  modified_base 3: mod_base = OTHER; note = 2'-O-methyluridine-3'-phosphate
  modified_base 4: mod_base = OTHER; note = 2'-O-methyluridine-3'-phosphate
  modified_base 5: mod_base = OTHER; note = 2'-O-methylcytidine-3'-phosphate
  modified_base 6: mod_base = OTHER; note = 2'-O-methylcytidine-3'-phosphate
  modified_base 7: mod_base = OTHER; note = Thymidine-glycol nucleic acid (GNA), S-Isomer
  modified_base 8: mod_base = OTHER; note = 2'-O-methylguanosine-3'-phosphate
  modified_base 9: mod_base = OTHER; note = 2'-O-methylguanosine-3'-phosphate
  modified_base 10: mod_base = OTHER; note = 2'-O-methyladenosine-3'-phosphate
  modified_base 11: mod_base = OTHER; note = 2'-O-methylguanosine-3'-phosphate
  modified_base 12: mod_base = OTHER; note = 2'-O-methylcytidine-3'-phosphate
  modified_base 13: mod_base = OTHER; note = 2'-O-methyladenosine-3'-phosphate
  modified_base 14: mod_base = OTHER; note = 2'-deoxy-2'-fluoroguanosine-3'-phosphate
  modified_base 15: mod_base = OTHER; note = 2'-O-methylcytidine-3'-phosphate
  modified_base 16: mod_base = OTHER; note = 2'-deoxy-2'-fluorouridine-3'-phosphate
  modified_base 17: mod_base = OTHER; note = 2'-O-methylguanosine-3'-phosphate
  modified_base 18: mod_base = OTHER; note = 2'-O-methylcytidine-3'-phosphate
  modified_base 19: mod_base = OTHER; note = 2'-O-methylcytidine-3'-phosphate
  modified_base 20: mod_base = OTHER; note = 2'-O-methyluridine-3'-phosphate
  modified_base 21: mod_base = OTHER; note = 2'-O-methylcytidine-3'-phosphorothioate
  modified_base 22: mod_base = OTHER; note = 2'-O-methyluridine-3'-phosphorothioate
  modified_base 23: mod_base = OTHER; note = 2'-O-methyladenosine
agttcctggagcagctgcctcta

SEQ ID NO: 754 - RNA, 23 nt, synthetic construct
  source 1..23: mol_type = other RNA
  modified_base 1: mod_base = OTHER; note = 2'-O-methyladenosine-3'-phosphorothioate
  modified_base 2: mod_base = OTHER; note = 2'-deoxy-2'-fluoroguanosine-3'-phosphorothioate
  modified_base 3: mod_base = OTHER; note = 2'-O-methyluridine-3'-phosphate
  modified_base 4: mod_base = OTHER; note = 2'-O-methylguanosine-3'-phosphate
  modified_base 5: mod_base = OTHER; note = 2'-O-methylcytidine-3'-phosphate
  modified_base 6: mod_base = OTHER; note = 2'-O-methyladenosine-3'-phosphate
  modified_base 7: mod_base = OTHER; note = Thymidine-glycol nucleic acid (GNA), S-Isomer
  modified_base 8: mod_base = OTHER; note = 2'-O-methylcytidine-3'-phosphate
  modified_base 9: mod_base = OTHER; note = 2'-O-methylcytidine-3'-phosphate
  modified_base 10: mod_base = OTHER; note = 2'-O-methyluridine-3'-phosphate
  modified_base 11: mod_base = OTHER; note = 2'-O-methyluridine-3'-phosphate
  modified_base 12: mod_base = OTHER; note = 2'-O-methylguanosine-3'-phosphate
  modified_base 13: mod_base = OTHER; note = 2'-O-methylguanosine-3'-phosphate
  modified_base 14: mod_base = OTHER; note = 2'-deoxy-2'-fluorocytidine-3'-phosphate
  modified_base 15: mod_base = OTHER; note = 2'-O-methylguanosine-3'-phosphate
  modified_base 16: mod_base = OTHER; note = 2'-deoxy-2'-fluoroguanosine-3'-phosphate
  modified_base 17: mod_base = OTHER; note = 2'-O-methyluridine-3'-phosphate
  modified_base 18: mod_base = OTHER; note = 2'-O-methylcytidine-3'-phosphate
  modified_base 19: mod_base = OTHER; note = 2'-O-methyluridine-3'-phosphate
  modified_base 20: mod_base = OTHER; note = 2'-O-methyluridine-3'-phosphate
  modified_base 21: mod_base = OTHER; note = 2'-O-methylguanosine-3'-phosphorothioate
  modified_base 22: mod_base = OTHER; note = 2'-O-methylguanosine-3'-phosphorothioate
  modified_base 23: mod_base = OTHER; note = 2'-O-methyluridine
agtgcatccttggcggtcttggt

SEQ ID NO: 755 - RNA, 23 nt, synthetic construct
  source 1..23: mol_type = other RNA
accaagaccgccaaggatgcact

SEQ ID NO: 756 - RNA, 23 nt, synthetic construct
  source 1..23: mol_type = other RNA
  modified_base 1: mod_base = OTHER; note = 2'-O-methyladenosine-3'-phosphorothioate
  modified_base 2: mod_base = OTHER; note = 2'-deoxy-2'-fluoroguanosine-3'-phosphorothioate
  modified_base 3: mod_base = OTHER; note = 2'-O-methylcytidine-3'-phosphate
  modified_base 4: mod_base = OTHER; note = 2'-O-methyluridine-3'-phosphate
  modified_base 5: mod_base = OTHER; note = 2'-O-methylcytidine-3'-phosphate
  modified_base 6: mod_base = OTHER; note = 2'-O-methylcytidine-3'-phosphate
  modified_base 7: mod_base = OTHER; note = Adenosine-glycol nucleic acid (GNA), S-isomer
  modified_base 8: mod_base = OTHER; note = 2'-O-methylguanosine-3'-phosphate
  modified_base 9: mod_base = OTHER; note = 2'-O-methyluridine-3'-phosphate
  modified_base 10: mod_base = OTHER; note = 2'-O-methyladenosine-3'-phosphate
  modified_base 11: mod_base = OTHER; note = 2'-O-methylguanosine-3'-phosphate
  modified_base 12: mod_base = OTHER; note = 2'-O-methyluridine-3'-phosphate
  modified_base 13: mod_base = OTHER; note = 2'-O-methylcytidine-3'-phosphate
  modified_base 14: mod_base = OTHER; note = 2'-deoxy-2'-fluorouridine-3'-phosphate
  modified_base 15: mod_base = OTHER; note = 2'-O-methyluridine-3'-phosphate
  modified_base 16: mod_base = OTHER; note = 2'-deoxy-2'-fluorouridine-3'-phosphate
  modified_base 17: mod_base = OTHER; note = 2'-O-methylcytidine-3'-phosphate
  modified_base 18: mod_base = OTHER; note = 2'-O-methyladenosine-3'-phosphate
  modified_base 19: mod_base = OTHER; note = 2'-O-methylguanosine-3'-phosphate
  modified_base 20: mod_base = OTHER; note = 2'-O-methylguanosine-3'-phosphate
  modified_base 21: mod_base = OTHER; note = 2'-O-methylguanosine-3'-phosphorothioate
  modified_base 22: mod_base = OTHER; note = 2'-O-methyladenosine-3'-phosphorothioate
  modified_base 23: mod_base = OTHER; note = 2'-O-methyladenosine
agctccagtagtctttcagggaa

SEQ ID NO: 757 - RNA, 23 nt, synthetic construct
  source 1..23: mol_type = other RNA
  modified_base 1: mod_base = OTHER; note = 2'-O-methyladenosine-3'-phosphorothioate
  modified_base 2: mod_base = OTHER; note = 2'-deoxy-2'-fluorocytidine-3'-phosphorothioate
  modified_base 3: mod_base = OTHER; note = 2'-O-methyladenosine-3'-phosphate
  modified_base 4: mod_base = OTHER; note = 2'-O-methyluridine-3'-phosphate
  modified_base 5: mod_base = OTHER; note = 2'-O-methylcytidine-3'-phosphate
  modified_base 6: mod_base = OTHER; note = 2'-O-methylcytidine-3'-phosphate
  modified_base 7: mod_base = OTHER; note = Thymidine-glycol nucleic acid (GNA), S-Isomer
  modified_base 8: mod_base = OTHER; note = 2'-O-methyluridine-3'-phosphate
  modified_base 9: mod_base = OTHER; note = 2'-O-methylguanosine-3'-phosphate
  modified_base 10: mod_base = OTHER; note = 2'-O-methylguanosine-3'-phosphate
  modified_base 11: mod_base = OTHER; note = 2'-O-methylcytidine-3'-phosphate
  modified_base 12: mod_base = OTHER; note = 2'-O-methylguanosine-3'-phosphate
  modified_base 13: mod_base = OTHER; note = 2'-O-methylguanosine-3'-phosphate
  modified_base 14: mod_base = OTHER; note = 2'-deoxy-2'-fluorouridine-3'-phosphate
  modified_base 15: mod_base = OTHER; note = 2'-O-methylcytidine-3'-phosphate
  modified_base 16: mod_base = OTHER; note = 2'-deoxy-2'-fluorouridine-3'-phosphate
  modified_base 17: mod_base = OTHER; note = 2'-O-methyluridine-3'-phosphate
  modified_base 18: mod_base = OTHER; note = 2'-O-methylguanosine-3'-phosphate
  modified_base 19: mod_base = OTHER; note = 2'-O-methylguanosine-3'-phosphate
  modified_base 20: mod_base = OTHER; note = 2'-O-methyluridine-3'-phosphate
  modified_base 21: mod_base = OTHER; note = 2'-O-methylguanosine-3'-phosphorothioate
  modified_base 22: mod_base = OTHER; note = 2'-O-methylguanosine-3'-phosphorothioate
  modified_base 23: mod_base = OTHER; note = 2'-O-methylcytidine
acatccttggcggtcttggtggc

SEQ ID NO: 758 - RNA, 23 nt, synthetic construct
  source 1..23: mol_type = other RNA
  modified_base 1: mod_base = OTHER; note = 2'-O-methyladenosine-3'-phosphorothioate
  modified_base 2: mod_base = OTHER; note = 2'-deoxy-2'-fluorouridine-3'-phosphorothioate
  modified_base 3: mod_base = OTHER; note = 2'-O-methylcytidine-3'-phosphate
  modified_base 4: mod_base = OTHER; note = 2'-O-methyluridine-3'-phosphate
  modified_base 5: mod_base = OTHER; note = 2'-O-methylguanosine-3'-phosphate
  modified_base 6: mod_base = OTHER; note = 2'-O-methyluridine-3'-phosphate
  modified_base 7: mod_base = OTHER; note = Thymidine-glycol nucleic acid (GNA), S-Isomer
  modified_base 8: mod_base = OTHER; note = 2'-O-methylcytidine-3'-phosphate
  modified_base 9: mod_base = OTHER; note = 2'-O-methylcytidine-3'-phosphate
  modified_base 10: mod_base = OTHER; note = 2'-O-methyluridine-3'-phosphate
  modified_base 11: mod_base = OTHER; note = 2'-O-methylguanosine-3'-phosphate
  modified_base 12: mod_base = OTHER; note = 2'-O-methylguanosine-3'-phosphate
  modified_base 13: mod_base = OTHER; note = 2'-O-methyladenosine-3'-phosphate
  modified_base 14: mod_base = OTHER; note = 2'-deoxy-2'-fluoroguanosine-3'-phosphate
  modified_base 15: mod_base = OTHER; note = 2'-O-methylcytidine-3'-phosphate
  modified_base 16: mod_base = OTHER; note = 2'-deoxy-2'-fluoroadenosine-3'-phosphate
  modified_base 17: mod_base = OTHER; note = 2'-O-methylguanosine-3'-phosphate
  modified_base 18: mod_base = OTHER; note = 2'-O-methylcytidine-3'-phosphate
  modified_base 19: mod_base = OTHER; note = 2'-O-methyluridine-3'-phosphate
  modified_base 20: mod_base = OTHER; note = 2'-O-methylguanosine-3'-phosphate
  modified_base 21: mod_base = OTHER; note = 2'-O-methylcytidine-3'-phosphorothioate
  modified_base 22: mod_base = OTHER; note = 2'-O-methylcytidine-3'-phosphorothioate
  modified_base 23: mod_base = OTHER; note = 2'-O-methyluridine
atctgttcctggagcagctgcct

SEQ ID NO: 759 - RNA, 23 nt, synthetic construct
  source 1..23: mol_type = other RNA
  modified_base 1: mod_base = OTHER; note = 2'-O-methyladenosine-3'-phosphorothioate
  modified_base 2: mod_base = OTHER; note = 2'-deoxy-2'-fluorocytidine-3'-phosphorothioate
  modified_base 3: mod_base = OTHER; note = 2'-O-methyluridine-3'-phosphate
  modified_base 4: mod_base = OTHER; note = 2'-O-methylcytidine-3'-phosphate
  modified_base 5: mod_base = OTHER; note = 2'-O-methylcytidine-3'-phosphate
  modified_base 6: mod_base = OTHER; note = 2'-O-methyladenosine-3'-phosphate
  modified_base 7: mod_base = OTHER; note = Guanosine-glycol nucleic acid (GNA), S-isomer
  modified_base 8: mod_base = OTHER; note = 2'-O-methyluridine-3'-phosphate
  modified_base 9: mod_base = OTHER; note = 2'-O-methyladenosine-3'-phosphate
  modified_base 10: mod_base = OTHER; note = 2'-O-methylguanosine-3'-phosphate
  modified_base 11: mod_base = OTHER; note = 2'-O-methyluridine-3'-phosphate
  modified_base 12: mod_base = OTHER; note = 2'-O-methylcytidine-3'-phosphate
  modified_base 13: mod_base = OTHER; note = 2'-O-methyluridine-3'-phosphate
  modified_base 14: mod_base = OTHER; note = 2'-deoxy-2'-fluorouridine-3'-phosphate
  modified_base 15: mod_base = OTHER; note = 2'-O-methyluridine-3'-phosphate
  modified_base 16: mod_base = OTHER; note = 2'-deoxy-2'-fluorocytidine-3'-phosphate
  modified_base 17: mod_base = OTHER; note = 2'-O-methyladenosine-3'-phosphate
  modified_base 18: mod_base = OTHER; note = 2'-O-methylguanosine-3'-phosphate
  modified_base 19: mod_base = OTHER; note = 2'-O-methylguanosine-3'-phosphate
  modified_base 20: mod_base = OTHER; note = 2'-O-methylguanosine-3'-phosphate
  modified_base 21: mod_base = OTHER; note = 2'-O-methyladenosine-3'-phosphorothioate
  modified_base 22: mod_base = OTHER; note = 2'-O-methyladenosine-3'-phosphorothioate
  modified_base 23: mod_base = OTHER; note = 2'-O-methylcytidine
actccagtagtctttcagggaac

SEQ ID NO: 760 - RNA, 23 nt, synthetic construct
  source 1..23: mol_type = other RNA
  modified_base 1: mod_base = OTHER; note = 2'-O-methyladenosine-3'-phosphorothioate
  modified_base 2: mod_base = OTHER; note = 2'-deoxy-2'-fluoroadenosine-3'-phosphorothioate
  modified_base 3: mod_base = OTHER; note = 2'-O-methylguanosine-3'-phosphate
  modified_base 4: mod_base = OTHER; note = 2'-O-methylguanosine-3'-phosphate
  modified_base 5: mod_base = OTHER; note = 2'-O-methylguanosine-3'-phosphate
  modified_base 6: mod_base = OTHER; note = 2'-O-methyladenosine-3'-phosphate
  modified_base 7: mod_base = OTHER; note = Adenosine-glycol nucleic acid (GNA), S-isomer
  modified_base 8: mod_base = OTHER; note = 2'-O-methylcytidine-3'-phosphate
  modified_base 9: mod_base = OTHER; note = 2'-O-methyluridine-3'-phosphate
  modified_base 10: mod_base = OTHER; note = 2'-O-methylguanosine-3'-phosphate
  modified_base 11: mod_base = OTHER; note = 2'-O-methyladenosine-3'-phosphate
  modified_base 12: mod_base = OTHER; note = 2'-O-methyladenosine-3'-phosphate
  modified_base 13: mod_base = OTHER; note = 2'-O-methylguanosine-3'-phosphate
  modified_base 14: mod_base = OTHER; note = 2'-deoxy-2'-fluorocytidine-3'-phosphate
  modified_base 15: mod_base = OTHER; note = 2'-O-methylcytidine-3'-phosphate
  modified_base 16: mod_base = OTHER; note = 2'-deoxy-2'-fluoroadenosine-3'-phosphate
  modified_base 17: mod_base = OTHER; note = 2'-O-methyluridine-3'-phosphate
  modified_base 18: mod_base = OTHER; note = 2'-O-methylcytidine-3'-phosphate
  modified_base 19: mod_base = OTHER; note = 2'-O-methylguanosine-3'-phosphate
  modified_base 20: mod_base = OTHER; note = 2'-O-methylguanosine-3'-phosphate
  modified_base 21: mod_base = OTHER; note = 2'-O-methyluridine-3'-phosphorothioate
  modified_base 22: mod_base = OTHER; note = 2'-O-methylcytidine-3'-phosphorothioate
  modified_base 23: mod_base = OTHER; note = 2'-O-methyladenosine
aagggaactgaagccatcggtca

SEQ ID NO: 761 - RNA, 23 nt, synthetic construct
  source 1..23: mol_type = other RNA
  modified_base 1: mod_base = OTHER; note = 2'-O-methyladenosine-3'-phosphorothioate
  modified_base 2: mod_base = OTHER; note = 2'-deoxy-2'-fluorouridine-3'-phosphorothioate
  modified_base 3: mod_base = OTHER; note = 2'-O-methylcytidine-3'-phosphate
  modified_base 4: mod_base = OTHER; note = 2'-O-methylcytidine-3'-phosphate
  modified_base 5: mod_base = OTHER; note = 2'-O-methyladenosine-3'-phosphate
  modified_base 6: mod_base = OTHER; note = 2'-O-methylguanosine-3'-phosphate
  modified_base 7: mod_base = OTHER; note = Cytidine-glycol nucleic acid (GNA), S-isomer
  modified_base 8: mod_base = OTHER; note = 2'-O-methyluridine-3'-phosphate
  modified_base 9: mod_base = OTHER; note = 2'-O-methyluridine-3'-phosphate
  modified_base 10: mod_base = OTHER; note = 2'-O-methyluridine-3'-phosphate
  modified_base 11: mod_base = OTHER; note = 2'-O-methyladenosine-3'-phosphate
  modified_base 12: mod_base = OTHER; note = 2'-O-methyluridine-3'-phosphate
  modified_base 13: mod_base = OTHER; note = 2'-O-methyluridine-3'-phosphate
  modified_base 14: mod_base = OTHER; note = 2'-deoxy-2'-fluoroguanosine-3'-phosphate
  modified_base 15: mod_base = OTHER; note = 2'-O-methylguanosine-3'-phosphate
  modified_base 16: mod_base = OTHER; note = 2'-deoxy-2'-fluoroguanosine-3'-phosphate
  modified_base 17: mod_base = OTHER; note = 2'-O-methyladenosine-3'-phosphate
  modified_base 18: mod_base = OTHER; note = 2'-O-methylguanosine-3'-phosphate
  modified_base 19: mod_base = OTHER; note = 2'-O-methylguanosine-3'-phosphate
  modified_base 20: mod_base = OTHER; note = 2'-O-methylcytidine-3'-phosphate
  modified_base 21: mod_base = OTHER; note = 2'-O-methylcytidine-3'-phosphorothioate
  modified_base 22: mod_base = OTHER; note = 2'-O-methyladenosine-3'-phosphorothioate
  modified_base 23: mod_base = OTHER; note = 2'-O-methylguanosine
atccagctttattgggaggccag

SEQ ID NO: 762 - RNA, 23 nt, synthetic construct
  source 1..23: mol_type = other RNA
  modified_base 1: mod_base = OTHER; note = 2'-O-methyladenosine-3'-phosphorothioate
  modified_base 2: mod_base = OTHER; note = 2'-deoxy-2'-fluoroguanosine-3'-phosphorothioate
  modified_base 3: mod_base = OTHER; note = 2'-O-methyluridine-3'-phosphate
  modified_base 4: mod_base = OTHER; note = 2'-O-methyladenosine-3'-phosphate
  modified_base 5: mod_base = OTHER; note = 2'-O-methyluridine-3'-phosphate
  modified_base 6: mod_base = OTHER; note = 2'-O-methyluridine-3'-phosphate
  modified_base 7: mod_base = OTHER; note = Guanosine-glycol nucleic acid (GNA), S-isomer
  modified_base 8: mod_base = OTHER; note = 2'-O-methyladenosine-3'-phosphate
  modified_base 9: mod_base = OTHER; note = 2'-O-methylguanosine-3'-phosphate
  modified_base 10: mod_base = OTHER; note = 2'-O-methylguanosine-3'-phosphate
  modified_base 11: mod_base = OTHER; note = 2'-O-methyluridine-3'-phosphate
  modified_base 12: mod_base = OTHER; note = 2'-O-methylcytidine-3'-phosphate
  modified_base 13: mod_base = OTHER; note = 2'-O-methyluridine-3'-phosphate
  modified_base 14: mod_base = OTHER; note = 2'-deoxy-2'-fluorocytidine-3'-phosphate
  modified_base 15: mod_base = OTHER; note = 2'-O-methyladenosine-3'-phosphate
  modified_base 16: mod_base = OTHER; note = 2'-deoxy-2'-fluoroguanosine-3'-phosphate
  modified_base 17: mod_base = OTHER; note = 2'-O-methylguanosine-3'-phosphate
  modified_base 18: mod_base = OTHER; note = 2'-O-methylcytidine-3'-phosphate
  modified_base 19: mod_base = OTHER; note = 2'-O-methyladenosine-3'-phosphate
  modified_base 20: mod_base = OTHER; note = 2'-O-methylguanosine-3'-phosphate
  modified_base 21: mod_base = OTHER; note = 2'-O-methylcytidine-3'-phosphorothioate
  modified_base 22: mod_base = OTHER; note = 2'-O-methylcytidine-3'-phosphorothioate
  modified_base 23: mod_base = OTHER; note = 2'-O-methyladenosine
agtattgaggtctcaggcagcca

SEQ ID NO: 763 - RNA, 23 nt, synthetic construct
  source 1..23: mol_type = other RNA
  modified_base 1: mod_base = OTHER; note = 2'-O-methyladenosine-3'-phosphorothioate
  modified_base 2: mod_base = OTHER; note = 2'-deoxy-2'-fluorouridine-3'-phosphorothioate
  modified_base 3: mod_base = OTHER; note = 2'-O-methyluridine-3'-phosphate
  modified_base 4: mod_base = OTHER; note = 2'-O-methylguanosine-3'-phosphate
  modified_base 5: mod_base = OTHER; note = 2'-O-methyladenosine-3'-phosphate
  modified_base 6: mod_base = OTHER; note = 2'-O-methylguanosine-3'-phosphate
  modified_base 7: mod_base = OTHER; note = Guanosine-glycol nucleic acid (GNA), S-isomer
  modified_base 8: mod_base = OTHER; note = 2'-O-methyluridine-3'-phosphate
  modified_base 9: mod_base = OTHER; note = 2'-O-methylcytidine-3'-phosphate
  modified_base 10: mod_base = OTHER; note = 2'-O-methyluridine-3'-phosphate
  modified_base 11: mod_base = OTHER; note = 2'-O-methylcytidine-3'-phosphate
  modified_base 12: mod_base = OTHER; note = 2'-O-methyladenosine-3'-phosphate
  modified_base 13: mod_base = OTHER; note = 2'-O-methylguanosine-3'-phosphate
  modified_base 14: mod_base = OTHER; note = 2'-deoxy-2'-fluoroguanosine-3'-phosphate
  modified_base 15: mod_base = OTHER; note = 2'-O-methylcytidine-3'-phosphate
  modified_base 16: mod_base = OTHER; note = 2'-deoxy-2'-fluoroadenosine-3'-phosphate
  modified_base 17: mod_base = OTHER; note = 2'-O-methylguanosine-3'-phosphate
  modified_base 18: mod_base = OTHER; note = 2'-O-methylcytidine-3'-phosphate
  modified_base 19: mod_base = OTHER; note = 2'-O-methylcytidine-3'-phosphate
  modified_base 20: mod_base = OTHER; note = 2'-O-methyladenosine-3'-phosphate
  modified_base 21: mod_base = OTHER; note = 2'-O-methylcytidine-3'-phosphorothioate
  modified_base 22: mod_base = OTHER; note = 2'-O-methylguanosine-3'-phosphorothioate
  modified_base 23: mod_base = OTHER; note = 2'-O-methylguanosine
attgaggtctcaggcagccacgg

SEQ ID NO: 764 - RNA, 23 nt, synthetic construct
  source 1..23: mol_type = other RNA
  modified_base 1: mod_base = OTHER; note = 2'-O-methyladenosine-3'-phosphorothioate
  modified_base 2: mod_base = OTHER; note = 2'-deoxy-2'-fluoroadenosine-3'-phosphorothioate
  modified_base 3: mod_base = OTHER; note = 2'-O-methylguanosine-3'-phosphate
  modified_base 4: mod_base = OTHER; note = 2'-O-methylcytidine-3'-phosphate
  modified_base 5: mod_base = OTHER; note = 2'-O-methyluridine-3'-phosphate
  modified_base 6: mod_base = OTHER; note = 2'-O-methylguanosine-3'-phosphate
  modified_base 7: mod_base = OTHER; note = Cytidine-glycol nucleic acid (GNA), S-isomer
  modified_base 8: mod_base = OTHER; note = 2'-O-methylcytidine-3'-phosphate
  modified_base 9: mod_base = OTHER; note = 2'-O-methyluridine-3'-phosphate
  modified_base 10: mod_base = OTHER; note = 2'-O-methylcytidine-3'-phosphate
  modified_base 11: mod_base = OTHER; note = 2'-O-methyluridine-3'-phosphate
  modified_base 12: mod_base = OTHER; note = 2'-O-methyladenosine-3'-phosphate
  modified_base 13: mod_base = OTHER; note = 2'-O-methylguanosine-3'-phosphate
  modified_base 14: mod_base = OTHER; note = 2'-deoxy-2'-fluoroguanosine-3'-phosphate
  modified_base 15: mod_base = OTHER; note = 2'-O-methylguanosine-3'-phosphate
  modified_base 16: mod_base = OTHER; note = 2'-deoxy-2'-fluoroadenosine-3'-phosphate
  modified_base 17: mod_base = OTHER; note = 2'-O-methyluridine-3'-phosphate
  modified_base 18: mod_base = OTHER; note = 2'-O-methylguanosine-3'-phosphate
  modified_base 19: mod_base = OTHER; note = 2'-O-methyladenosine-3'-phosphate
  modified_base 20: mod_base = OTHER; note = 2'-O-methyladenosine-3'-phosphate
  modified_base 21: mod_base = OTHER; note = 2'-O-methylcytidine-3'-phosphorothioate
  modified_base 22: mod_base = OTHER; note = 2'-O-methyluridine-3'-phosphorothioate
  modified_base 23: mod_base = OTHER; note = 2'-O-methylguanosine
aagctgcctctagggatgaactg

SEQ ID NO: 765 - RNA, 23 nt, synthetic construct
  source 1..23: mol_type = other RNA
  modified_base 1: mod_base = OTHER; note = 2'-O-methyladenosine-3'-phosphorothioate
  modified_base 2: mod_base = OTHER; note = 2'-deoxy-2'-fluoroadenosine-3'-phosphorothioate
  modified_base 3: mod_base = OTHER; note = 2'-O-methylguanosine-3'-phosphate
  modified_base 4: mod_base = OTHER; note = 2'-O-methylcytidine-3'-phosphate
  modified_base 5: mod_base = OTHER; note = 2'-O-methyladenosine-3'-phosphate
  modified_base 6: mod_base = OTHER; note = 2'-O-methylguanosine-3'-phosphate
  modified_base 7: mod_base = OTHER; note = Cytidine-glycol nucleic acid (GNA), S-isomer
  modified_base 8: mod_base = OTHER; note = 2'-O-methyluridine-3'-phosphate
  modified_base 9: mod_base = OTHER; note = 2'-O-methylguanosine-3'-phosphate
  modified_base 10: mod_base = OTHER; note = 2'-O-methylcytidine-3'-phosphate
  modified_base 11: mod_base = OTHER; note = 2'-O-methylcytidine-3'-phosphate
  modified_base 12: mod_base = OTHER; note = 2'-O-methyluridine-3'-phosphate
  modified_base 13: mod_base = OTHER; note = 2'-O-methylcytidine-3'-phosphate
  modified_base 14: mod_base = OTHER; note = 2'-deoxy-2'-fluorouridine-3'-phosphate
  modified_base 15: mod_base = OTHER; note = 2'-O-methyladenosine-3'-phosphate
  modified_base 16: mod_base = OTHER; note = 2'-deoxy-2'-fluoroguanosine-3'-phosphate
  modified_base 17: mod_base = OTHER; note = 2'-O-methylguanosine-3'-phosphate
  modified_base 18: mod_base = OTHER; note = 2'-O-methylguanosine-3'-phosphate
  modified_base 19: mod_base = OTHER; note = 2'-O-methyladenosine-3'-phosphate
  modified_base 20: mod_base = OTHER; note = 2'-O-methyluridine-3'-phosphate
  modified_base 21: mod_base = OTHER; note = 2'-O-methylguanosine-3'-phosphorothioate
  modified_base 22: mod_base = OTHER; note = 2'-O-methyladenosine-3'-phosphorothioate
  modified_base 23: mod_base = OTHER; note = 2'-O-methyladenosine
aagcagctgcctctagggatgaa

SEQ ID NO: 766 - RNA, 23 nt, synthetic construct
  source 1..23: mol_type = other RNA
  modified_base 1: mod_base = OTHER; note = 2'-O-methyladenosine-3'-phosphorothioate
  modified_base 2: mod_base = OTHER; note = 2'-deoxy-2'-fluorouridine-3'-phosphorothioate
  modified_base 3: mod_base = OTHER; note = 2'-O-methyladenosine-3'-phosphate
  modified_base 4: mod_base = OTHER; note = 2'-O-methyluridine-3'-phosphate
  modified_base 5: mod_base = OTHER; note = 2'-O-methyluridine-3'-phosphate
  modified_base 6: mod_base = OTHER; note = 2'-O-methylguanosine-3'-phosphate
  modified_base 7: mod_base = OTHER; note = Adenosine-glycol nucleic acid (GNA), S-isomer
  modified_base 8: mod_base = OTHER; note = 2'-O-methylguanosine-3'-phosphate
  modified_base 9: mod_base = OTHER; note = 2'-O-methylguanosine-3'-phosphate
  modified_base 10: mod_base = OTHER; note = 2'-O-methyluridine-3'-phosphate
  modified_base 11: mod_base = OTHER; note = 2'-O-methylcytidine-3'-phosphate
  modified_base 12: mod_base = OTHER; note = 2'-O-methyluridine-3'-phosphate
  modified_base 13: mod_base = OTHER; note = 2'-O-methylcytidine-3'-phosphate
  modified_base 14: mod_base = OTHER; note = 2'-deoxy-2'-fluoroadenosine-3'-phosphate
  modified_base 15: mod_base = OTHER; note = 2'-O-methylguanosine-3'-phosphate
  modified_base 16: mod_base = OTHER; note = 2'-deoxy-2'-fluoroguanosine-3'-phosphate
  modified_base 17: mod_base = OTHER; note = 2'-O-methylcytidine-3'-phosphate
  modified_base 18: mod_base = OTHER; note = 2'-O-methyladenosine-3'-phosphate
  modified_base 19: mod_base = OTHER; note = 2'-O-methylguanosine-3'-phosphate
  modified_base 20: mod_base = OTHER; note = 2'-O-methylcytidine-3'-phosphate
  modified_base 21: mod_base = OTHER; note = 2'-O-methylcytidine-3'-phosphorothioate
  modified_base 22: mod_base = OTHER; note = 2'-O-methyladenosine-3'-phosphorothioate
  modified_base 23: mod_base = OTHER; note = 2'-O-methylcytidine
atattgaggtctcaggcagccac

SEQ ID NO: 767 - RNA, 23 nt, synthetic construct
  source 1..23: mol_type = other RNA
  modified_base 1: mod_base = OTHER; note = 2'-O-methyladenosine-3'-phosphorothioate
  modified_base 2: mod_base = OTHER; note = 2'-deoxy-2'-fluorouridine-3'-phosphorothioate
  modified_base 3: mod_base = OTHER; note = 2'-O-methylguanosine-3'-phosphate
  modified_base 4: mod_base = OTHER; note = 2'-O-methylcytidine-3'-phosphate
  modified_base 5: mod_base = OTHER; note = 2'-O-methyluridine-3'-phosphate
  modified_base 6: mod_base = OTHER; note = 2'-O-methylcytidine-3'-phosphate
  modified_base 7: mod_base = OTHER; note = Cytidine-glycol nucleic acid (GNA), S-isomer
  modified_base 8: mod_base = OTHER; note = 2'-O-methyladenosine-3'-phosphate
  modified_base 9: mod_base = OTHER; note = 2'-O-methylguanosine-3'-phosphate
  modified_base 10: mod_base = OTHER; note = 2'-O-methyluridine-3'-phosphate
  modified_base 11: mod_base = OTHER; note = 2'-O-methyladenosine-3'-phosphate
  modified_base 12: mod_base = OTHER; note = 2'-O-methylguanosine-3'-phosphate
  modified_base 13: mod_base = OTHER; note = 2'-O-methyluridine-3'-phosphate
  modified_base 14: mod_base = OTHER; note = 2'-deoxy-2'-fluorocytidine-3'-phosphate
  modified_base 15: mod_base = OTHER; note = 2'-O-methyluridine-3'-phosphate
  modified_base 16: mod_base = OTHER; note = 2'-deoxy-2'-fluorouridine-3'-phosphate
  modified_base 17: mod_base = OTHER; note = 2'-O-methyluridine-3'-phosphate
  modified_base 18: mod_base = OTHER; note = 2'-O-methylcytidine-3'-phosphate
  modified_base 19: mod_base = OTHER; note = 2'-O-methyladenosine-3'-phosphate
  modified_base 20: mod_base = OTHER; note = 2'-O-methylguanosine-3'-phosphate
  modified_base 21: mod_base = OTHER; note = 2'-O-methylguanosine-3'-phosphorothioate
  modified_base 22: mod_base = OTHER; note = 2'-O-methylguanosine-3'-phosphorothioate
  modified_base 23: mod_base = OTHER; note = 2'-O-methyladenosine
atgctccagtagtctttcaggga

SEQ ID NO: 768 - RNA, 23 nt, synthetic construct
  source 1..23: mol_type = other RNA
  modified_base 1: mod_base = OTHER; note = 2'-O-methyladenosine-3'-phosphorothioate
  modified_base 2: mod_base = OTHER; note = 2'-deoxy-2'-fluorouridine-3'-phosphorothioate
  modified_base 3: mod_base = OTHER; note = 2'-O-methylcytidine-3'-phosphate
  modified_base 4: mod_base = OTHER; note = 2'-O-methylcytidine-3'-phosphate
  modified_base 5: mod_base = OTHER; note = 2'-O-methyluridine-3'-phosphate
  modified_base 6: mod_base = OTHER; note = 2'-O-methylguanosine-3'-phosphate
  modified_base 7: mod_base = OTHER; note = Guanosine-glycol nucleic acid (GNA), S-isomer
  modified_base 8: mod_base = OTHER; note = 2'-O-methyladenosine-3'-phosphate
  modified_base 9: mod_base = OTHER; note = 2'-O-methylguanosine-3'-phosphate
  modified_base 10: mod_base = OTHER; note = 2'-O-methylcytidine-3'-phosphate
  modified_base 11: mod_base = OTHER; note = 2'-O-methyladenosine-3'-phosphate
  modified_base 12: mod_base = OTHER; note = 2'-O-methylguanosine-3'-phosphate
  modified_base 13: mod_base = OTHER; note = 2'-O-methylcytidine-3'-phosphate
  modified_base 14: mod_base = OTHER; note = 2'-deoxy-2'-fluorouridine-3'-phosphate
  modified_base 15: mod_base = OTHER; note = 2'-O-methylguanosine-3'-phosphate
  modified_base 16: mod_base = OTHER; note = 2'-deoxy-2'-fluorocytidine-3'-phosphate
  modified_base 17: mod_base = OTHER; note = 2'-O-methylcytidine-3'-phosphate
  modified_base 18: mod_base = OTHER; note = 2'-O-methyluridine-3'-phosphate
  modified_base 19: mod_base = OTHER; note = 2'-O-methylcytidine-3'-phosphate
  modified_base 20: mod_base = OTHER; note = 2'-O-methyluridine-3'-phosphate
  modified_base 21: mod_base = OTHER; note = 2'-O-methyladenosine-3'-phosphorothioate
  modified_base 22: mod_base = OTHER; note = 2'-O-methylguanosine-3'-phosphorothioate
  modified_base 23: mod_base = OTHER; note = 2'-O-methylguanosine
atcctggagcagctgcctctagg

SEQ ID NO: 769 - RNA, 23 nt, synthetic construct
  source 1..23: mol_type = other RNA
  modified_base 1: mod_base = OTHER; note = 2'-O-methyladenosine-3'-phosphorothioate
  modified_base 2: mod_base = OTHER; note = 2'-deoxy-2'-fluoroguanosine-3'-phosphorothioate
  modified_base 3: mod_base = OTHER; note = 2'-O-methylcytidine-3'-phosphate
  modified_base 4: mod_base = OTHER; note = 2'-O-methyladenosine-3'-phosphate
  modified_base 5: mod_base = OTHER; note = 2'-O-methylguanosine-3'-phosphate
  modified_base 6: mod_base = OTHER; note = 2'-O-methylcytidine-3'-phosphate
  modified_base 7: mod_base = OTHER; note = Thymidine-glycol nucleic acid (GNA), S-Isomer
  modified_base 8: mod_base = OTHER; note = 2'-O-methylguanosine-3'-phosphate
  modified_base 9: mod_base = OTHER; note = 2'-O-methylcytidine-3'-phosphate
  modified_base 10: mod_base = OTHER; note = 2'-O-methylcytidine-3'-phosphate
  modified_base 11: mod_base = OTHER; note = 2'-O-methyluridine-3'-phosphate
  modified_base 12: mod_base = OTHER; note = 2'-O-methylcytidine-3'-phosphate
  modified_base 13: mod_base = OTHER; note = 2'-O-methyluridine-3'-phosphate
  modified_base 14: mod_base = OTHER; note = 2'-deoxy-2'-fluoroadenosine-3'-phosphate
  modified_base 15: mod_base = OTHER; note = 2'-O-methylguanosine-3'-phosphate
  modified_base 16: mod_base = OTHER; note = 2'-deoxy-2'-fluoroguanosine-3'-phosphate
  modified_base 17: mod_base = OTHER; note = 2'-O-methylguanosine-3'-phosphate
  modified_base 18: mod_base = OTHER; note = 2'-O-methyladenosine-3'-phosphate
  modified_base 19: mod_base = OTHER; note = 2'-O-methyluridine-3'-phosphate
  modified_base 20: mod_base = OTHER; note = 2'-O-methylguanosine-3'-phosphate
  modified_base 21: mod_base = OTHER; note = 2'-O-methyladenosine-3'-phosphorothioate
  modified_base 22: mod_base = OTHER; note = 2'-O-methyladenosine-3'-phosphorothioate
  modified_base 23: mod_base = OTHER; note = 2'-O-methylcytidine
agcagctgcctctagggatgaac

SEQ ID NO: 770 - RNA, 23 nt, synthetic construct
  source 1..23: mol_type = other RNA
  modified_base 1: mod_base = OTHER; note = 2'-O-methyladenosine-3'-phosphorothioate
  modified_base 2: mod_base = OTHER; note = 2'-deoxy-2'-fluorouridine-3'-phosphorothioate
  modified_base 3: mod_base = OTHER; note = 2'-O-methylcytidine-3'-phosphate
  modified_base 4: mod_base = OTHER; note = 2'-O-methylcytidine-3'-phosphate
  modified_base 5: mod_base = OTHER; note = 2'-O-methyladenosine-3'-phosphate
  modified_base 6: mod_base = OTHER; note = 2'-O-methylguanosine-3'-phosphate
  modified_base 7: mod_base = OTHER; note = Thymidine-glycol nucleic acid (GNA), S-Isomer
  modified_base 8: mod_base = OTHER; note = 2'-O-methyladenosine-3'-phosphate
  modified_base 9: mod_base = OTHER; note = 2'-O-methylguanosine-3'-phosphate
  modified_base 10: mod_base = OTHER; note = 2'-O-methyluridine-3'-phosphate
  modified_base 11: mod_base = OTHER; note = 2'-O-methylcytidine-3'-phosphate
  modified_base 12: mod_base = OTHER; note = 2'-O-methyluridine-3'-phosphate
  modified_base 13: mod_base = OTHER; note = 2'-O-methyluridine-3'-phosphate
  modified_base 14: mod_base = OTHER; note = 2'-deoxy-2'-fluorouridine-3'-phosphate
  modified_base 15: mod_base = OTHER; note = 2'-O-methylcytidine-3'-phosphate
  modified_base 16: mod_base = OTHER; note = 2'-deoxy-2'-fluoroadenosine-3'-phosphate
  modified_base 17: mod_base = OTHER; note = 2'-O-methylguanosine-3'-phosphate
  modified_base 18: mod_base = OTHER; note = 2'-O-methylguanosine-3'-phosphate
  modified_base 19: mod_base = OTHER; note = 2'-O-methylguanosine-3'-phosphate
  modified_base 20: mod_base = OTHER; note = 2'-O-methyladenosine-3'-phosphate
  modified_base 21: mod_base = OTHER; note = 2'-O-methyladenosine-3'-phosphorothioate
  modified_base 22: mod_base = OTHER; note = 2'-O-methylcytidine-3'-phosphorothioate
  modified_base 23: mod_base = OTHER; note = 2'-O-methyluridine
atccagtagtctttcagggaact

SEQ ID NO: 771 - RNA, 23 nt, synthetic construct
  source 1..23: mol_type = other RNA
  modified_base 1: mod_base = OTHER; note = 2'-O-methyladenosine-3'-phosphorothioate
  modified_base 2: mod_base = OTHER; note = 2'-deoxy-2'-fluorouridine-3'-phosphorothioate
  modified_base 3: mod_base = OTHER; note = 2'-O-methylguanosine-3'-phosphate
  modified_base 4: mod_base = OTHER; note = 2'-O-methylguanosine-3'-phosphate
  modified_base 5: mod_base = OTHER; note = 2'-O-methyladenosine-3'-phosphate
  modified_base 6: mod_base = OTHER; note = 2'-O-methylguanosine-3'-phosphate
  modified_base 7: mod_base = OTHER; note = Cytidine-glycol nucleic acid (GNA), S-isomer
  modified_base 8: mod_base = OTHER; note = 2'-O-methyladenosine-3'-phosphate
  modified_base 9: mod_base = OTHER; note = 2'-O-methylguanosine-3'-phosphate
  modified_base 10: mod_base = OTHER; note = 2'-O-methylcytidine-3'-phosphate
  modified_base 11: mod_base = OTHER; note = 2'-O-methyluridine-3'-phosphate
  modified_base 12: mod_base = OTHER; note = 2'-O-methylguanosine-3'-phosphate
  modified_base 13: mod_base = OTHER; note = 2'-O-methylcytidine-3'-phosphate
  modified_base 14: mod_base = OTHER; note = 2'-deoxy-2'-fluorocytidine-3'-phosphate
  modified_base 15: mod_base = OTHER; note = 2'-O-methyluridine-3'-phosphate
  modified_base 16: mod_base = OTHER; note = 2'-deoxy-2'-fluorocytidine-3'-phosphate
  modified_base 17: mod_base = OTHER; note = 2'-O-methyluridine-3'-phosphate
  modified_base 18: mod_base = OTHER; note = 2'-O-methyladenosine-3'-phosphate
  modified_base 19: mod_base = OTHER; note = 2'-O-methylguanosine-3'-phosphate
  modified_base 20: mod_base = OTHER; note = 2'-O-methylguanosine-3'-phosphate
  modified_base 21: mod_base = OTHER; note = 2'-O-methylguanosine-3'-phosphorothioate
  modified_base 22: mod_base = OTHER; note = 2'-O-methyladenosine-3'-phosphorothioate
  modified_base 23: mod_base = OTHER; note = 2'-O-methyluridine
atggagcagctgcctctagggat

SEQ ID NO: 772 - RNA, 21 nt, synthetic construct
  source 1..21: mol_type = other RNA
  modified_base 1: mod_base = OTHER; note = 2'-O-methylcytidine-3'-phosphorothioate
  modified_base 2: mod_base = OTHER; note = 2'-O-methyladenosine-3'-phosphorothioate
  modified_base 3: mod_base = OTHER; note = 2'-O-methyladenosine-3'-phosphate
  modified_base 4: mod_base = OTHER; note = 2'-O-methylguanosine-3'-phosphate
  modified_base 5: mod_base = OTHER; note = 2'-O-methyladenosine-3'-phosphate
  modified_base 6: mod_base = OTHER; note = 2'-O-methylcytidine-3'-phosphate
  modified_base 7: mod_base = OTHER; note = 2'-deoxy-2'-fluorocytidine-3'-phosphate
  modified_base 8: mod_base = OTHER; note = 2'-O-methylguanosine-3'-phosphate
  modified_base 9: mod_base = OTHER; note = 2'-deoxy-2'-fluorocytidine-3'-phosphate
  modified_base 10: mod_base = OTHER; note = 2'-deoxy-2'-fluorocytidine-3'-phosphate
  modified_base 11: mod_base = OTHER; note = 2'-deoxy-2'-fluoroadenosine-3'-phosphate
  modified_base 12: mod_base = OTHER; note = 2'-O-methyladenosine-3'-phosphate
  modified_base 13: mod_base = OTHER; note = 2'-O-methylguanosine-3'-phosphate
  modified_base 14: mod_base = OTHER; note = 2'-O-methylguanosine-3'-phosphate
  modified_base 15: mod_base = OTHER; note = 2'-O-methyladenosine-3'-phosphate
  modified_base 16: mod_base = OTHER; note = 2'-O-methyluridine-3'-phosphate
  modified_base 17: mod_base = OTHER; note = 2'-O-methylguanosine-3'-phosphate
  modified_base 18: mod_base = OTHER; note = 2'-O-methylcytidine-3'-phosphate
  modified_base 19: mod_base = OTHER; note = 2'-O-methyladenosine-3'-phosphate
  modified_base 20: mod_base = OTHER; note = 2'-O-methylcytidine-3'-phosphate
  modified_base 21: mod_base = OTHER; note = 2'-O-methyluridine-3'-phosphate ((2S,4R)-1-[29-[[2-(acetylamino)-2-deoxy-beta-D-galactopyra nosyl]oxy]-14,14-bis[[3-[[3-[[5-[[2-(acetylamino)-2-deoxy-b eta-D-galactopyranosyl]oxy]-1-oxopentyl]amino]propyl]amino] -3-oxopropoxy]methyl]-1,12,19,25-tetraoxo-16-oxa-13,20,24-t riazanonacos-1-yl]-4-hydroxy-2-pyrrolidinyl)methyl ester
caagaccgccaaggatgcact

SEQ ID NO: 773 - RNA, 23 nt, synthetic construct
  source 1..23: mol_type = other RNA
  modified_base 1: mod_base = OTHER; note = 2'-O-methyladenosine-3'-phosphorothioate
  modified_base 2: mod_base = OTHER; note = 2'-deoxy-2'-fluoroguanosine-3'-phosphorothioate
  modified_base 3: mod_base = OTHER; note = 2'-O-methyladenosine-3'-phosphate
  modified_base 4: mod_base = OTHER; note = 2'-O-methyladenosine-3'-phosphate
  modified_base 5: mod_base = OTHER; note = 2'-O-methyluridine-3'-phosphate
  modified_base 6: mod_base = OTHER; note = 2'-O-methyladenosine-3'-phosphate
  modified_base 7: mod_base = OTHER; note = Cytidine-glycol nucleic acid (GNA), S-isomer
  modified_base 8: mod_base = OTHER; note = 2'-O-methyluridine-3'-phosphate
  modified_base 9: mod_base = OTHER; note = 2'-O-methylguanosine-3'-phosphate
  modified_base 10: mod_base = OTHER; note = 2'-O-methyluridine-3'-phosphate
  modified_base 11: mod_base = OTHER; note = 2'-O-methylcytidine-3'-phosphate
  modified_base 12: mod_base = OTHER; note = 2'-O-methylcytidine-3'-phosphate
  modified_base 13: mod_base = OTHER; note = 2'-O-methylcytidine-3'-phosphate
  modified_base 14: mod_base = OTHER; note = 2'-deoxy-2'-fluorouridine-3'-phosphate
  modified_base 15: mod_base = OTHER; note = 2'-O-methyluridine-3'-phosphate
  modified_base 16: mod_base = OTHER; note = 2'-deoxy-2'-fluorouridine-3'-phosphate
  modified_base 17: mod_base = OTHER; note = 2'-O-methyluridine-3'-phosphate
  modified_base 18: mod_base = OTHER; note = 2'-O-methyladenosine-3'-phosphate
  modified_base 19: mod_base = OTHER; note = 2'-O-methyladenosine-3'-phosphate
  modified_base 20: mod_base = OTHER; note = 2'-O-methylguanosine-3'-phosphate
  modified_base 21: mod_base = OTHER; note = 2'-O-methylcytidine-3'-phosphorothioate
  modified_base 22: mod_base = OTHER; note = 2'-O-methyladenosine-3'-phosphorothioate
  modified_base 23: mod_base = OTHER; note = 2'-O-methyladenosine
agaatactgtcccttttaagcaa

SEQ ID NO: 774 - RNA, 23 nt, synthetic construct
  source 1..23: mol_type = other RNA
  modified_base 1: mod_base = OTHER; note = 2'-O-methyladenosine-3'-phosphorothioate
  modified_base 2: mod_base = OTHER; note = 2'-deoxy-2'-fluoroguanosine-3'-phosphorothioate
  modified_base 3: mod_base = OTHER; note = 2'-O-methyladenosine-3'-phosphate
  modified_base 4: mod_base = OTHER; note = 2'-O-methylguanosine-3'-phosphate
  modified_base 5: mod_base = OTHER; note = 2'-O-methyladenosine-3'-phosphate
  modified_base 6: mod_base = OTHER; note = 2'-O-methyladenosine-3'-phosphate
  modified_base 7: mod_base = OTHER; note = Thymidine-glycol nucleic acid (GNA), S-Isomer
  modified_base 8: mod_base = OTHER; note = 2'-O-methyladenosine-3'-phosphate
  modified_base 9: mod_base = OTHER; note = 2'-O-methylcytidine-3'-phosphate
  modified_base 10: mod_base = OTHER; note = 2'-O-methyluridine-3'-phosphate
  modified_base 11: mod_base = OTHER; note = 2'-O-methylguanosine-3'-phosphate
  modified_base 12: mod_base = OTHER; note = 2'-O-methyluridine-3'-phosphate
  modified_base 13: mod_base = OTHER; note = 2'-O-methylcytidine-3'-phosphate
  modified_base 14: mod_base = OTHER; note = 2'-deoxy-2'-fluorocytidine-3'-phosphate
  modified_base 15: mod_base = OTHER; note = 2'-O-methylcytidine-3'-phosphate
  modified_base 16: mod_base = OTHER; note = 2'-deoxy-2'-fluorouridine-3'-phosphate
  modified_base 17: mod_base = OTHER; note = 2'-O-methyluridine-3'-phosphate
  modified_base 18: mod_base = OTHER; note = 2'-O-methyluridine-3'-phosphate
  modified_base 19: mod_base = OTHER; note = 2'-O-methyluridine-3'-phosphate
  modified_base 20: mod_base = OTHER; note = 2'-O-methyladenosine-3'-phosphate
  modified_base 21: mod_base = OTHER; note = 2'-O-methyladenosine-3'-phosphorothioate
  modified_base 22: mod_base = OTHER; note = 2'-O-methylguanosine-3'-phosphorothioate
  modified_base 23: mod_base = OTHER; note = 2'-O-methylcytidine
agagaatactgtcccttttaagc

SEQ ID NO: 775 - RNA, 23 nt, synthetic construct
  source 1..23: mol_type = other RNA
  modified_base 1: mod_base = OTHER; note = 2'-O-methyladenosine-3'-phosphorothioate
  modified_base 2: mod_base = OTHER; note = 2'-deoxy-2'-fluorocytidine-3'-phosphorothioate
  modified_base 3: mod_base = OTHER; note = 2'-O-methylcytidine-3'-phosphate
  modified_base 4: mod_base = OTHER; note = 2'-O-methyluridine-3'-phosphate
  modified_base 5: mod_base = OTHER; note = 2'-O-methyluridine-3'-phosphate
  modified_base 6: mod_base = OTHER; note = 2'-O-methylguanosine-3'-phosphate
  modified_base 7: mod_base = OTHER; note = Guanosine-glycol nucleic acid (GNA), S-isomer
  modified_base 8: mod_base = OTHER; note = 2'-O-methylcytidine-3'-phosphate
  modified_base 9: mod_base = OTHER; note = 2'-O-methylguanosine-3'-phosphate
  modified_base 10: mod_base = OTHER; note = 2'-O-methylguanosine-3'-phosphate
  modified_base 11: mod_base = OTHER; note = 2'-O-methyluridine-3'-phosphate
  modified_base 12: mod_base = OTHER; note = 2'-O-methylcytidine-3'-phosphate
  modified_base 13: mod_base = OTHER; note = 2'-O-methyluridine-3'-phosphate
  modified_base 14: mod_base = OTHER; note = 2'-deoxy-2'-fluorouridine-3'-phosphate
  modified_base 15: mod_base = OTHER; note = 2'-O-methylguanosine-3'-phosphate
  modified_base 16: mod_base = OTHER; note = 2'-deoxy-2'-fluoroguanosine-3'-phosphate
  modified_base 17: mod_base = OTHER; note = 2'-O-methyluridine-3'-phosphate
  modified_base 18: mod_base = OTHER; note = 2'-O-methylguanosine-3'-phosphate
  modified_base 19: mod_base = OTHER; note = 2'-O-methylguanosine-3'-phosphate
  modified_base 20: mod_base = OTHER; note = 2'-O-methylcytidine-3'-phosphate
  modified_base 21: mod_base = OTHER; note = 2'-O-methylguanosine-3'-phosphorothioate
  modified_base 22: mod_base = OTHER; note = 2'-O-methyluridine-3'-phosphorothioate
  modified_base 23: mod_base = OTHER; note = 2'-O-methylguanosine
accttggcggtcttggtggcgtg

SEQ ID NO: 776 - RNA, 23 nt, synthetic construct
  source 1..23: mol_type = other RNA
  modified_base 1: mod_base = OTHER; note = 2'-O-methyladenosine-3'-phosphorothioate
  modified_base 2: mod_base = OTHER; note = 2'-deoxy-2'-fluoroadenosine-3'-phosphorothioate
  modified_base 3: mod_base = OTHER; note = 2'-O-methyladenosine-3'-phosphate
  modified_base 4: mod_base = OTHER; note = 2'-O-methylguanosine-3'-phosphate
  modified_base 5: mod_base = OTHER; note = 2'-O-methylcytidine-3'-phosphate
  modified_base 6: mod_base = OTHER; note = 2'-O-methylcytidine-3'-phosphate
  modified_base 7: mod_base = OTHER; note = Adenosine-glycol nucleic acid (GNA), S-isomer
  modified_base 8: mod_base = OTHER; note = 2'-O-methyluridine-3'-phosphate
  modified_base 9: mod_base = OTHER; note = 2'-O-methylcytidine-3'-phosphate
  modified_base 10: mod_base = OTHER; note = 2'-O-methylguanosine-3'-phosphate
  modified_base 11: mod_base = OTHER; note = 2'-O-methylguanosine-3'-phosphate
  modified_base 12: mod_base = OTHER; note = 2'-O-methyluridine-3'-phosphate
  modified_base 13: mod_base = OTHER; note = 2'-O-methylcytidine-3'-phosphate
  modified_base 14: mod_base = OTHER; note = 2'-deoxy-2'-fluoroadenosine-3'-phosphate
  modified_base 15: mod_base = OTHER; note = 2'-O-methylcytidine-3'-phosphate
  modified_base 16: mod_base = OTHER; note = 2'-deoxy-2'-fluorocytidine-3'-phosphate
  modified_base 17: mod_base = OTHER; note = 2'-O-methylcytidine-3'-phosphate
  modified_base 18: mod_base = OTHER; note = 2'-O-methyladenosine-3'-phosphate
  modified_base 19: mod_base = OTHER; note = 2'-O-methylguanosine-3'-phosphate
  modified_base 20: mod_base = OTHER; note = 2'-O-methylcytidine-3'-phosphate
  modified_base 21: mod_base = OTHER; note = 2'-O-methylcytidine-3'-phosphorothioate
  modified_base 22: mod_base = OTHER; note = 2'-O-methylcytidine-3'-phosphorothioate
  modified_base 23: mod_base = OTHER; note = 2'-O-methylcytidine
aaagccatcggtcacccagcccc

SEQ ID NO: 777 - RNA, 23 nt, synthetic construct
  source 1..23: mol_type = other RNA
  modified_base 1: mod_base = OTHER; note = 2'-O-methyladenosine-3'-phosphorothioate
  modified_base 2: mod_base = OTHER; note = 2'-deoxy-2'-fluoroadenosine-3'-phosphorothioate
  modified_base 3: mod_base = OTHER; note = 2'-O-methylcytidine-3'-phosphate
  modified_base 4: mod_base = OTHER; note = 2'-O-methyluridine-3'-phosphate
  modified_base 5: mod_base = OTHER; note = 2'-O-methylguanosine-3'-phosphate
  modified_base 6: mod_base = OTHER; note = 2'-O-methyluridine-3'-phosphate
  modified_base 7: mod_base = OTHER; note = Cytidine-glycol nucleic acid (GNA), S-isomer
  modified_base 8: mod_base = OTHER; note = 2'-O-methylcytidine-3'-phosphate
  modified_base 9: mod_base = OTHER; note = 2'-O-methylcytidine-3'-phosphate
  modified_base 10: mod_base = OTHER; note = 2'-O-methyluridine-3'-phosphate
  modified_base 11: mod_base = OTHER; note = 2'-O-methyluridine-3'-phosphate
  modified_base 12: mod_base = OTHER; note = 2'-O-methyluridine-3'-phosphate
  modified_base 13: mod_base = OTHER; note = 2'-O-methyluridine-3'-phosphate
  modified_base 14: mod_base = OTHER; note = 2'-deoxy-2'-fluoroadenosine-3'-phosphate
  modified_base 15: mod_base = OTHER; note = 2'-O-methyladenosine-3'-phosphate
  modified_base 16: mod_base = OTHER; note = 2'-deoxy-2'-fluoroguanosine-3'-phosphate
  modified_base 17: mod_base = OTHER; note = 2'-O-methylcytidine-3'-phosphate
  modified_base 18: mod_base = OTHER; note = 2'-O-methyladenosine-3'-phosphate
  modified_base 19: mod_base = OTHER; note = 2'-O-methyladenosine-3'-phosphate
  modified_base 20: mod_base = OTHER; note = 2'-O-methylcytidine-3'-phosphate
  modified_base 21: mod_base = OTHER; note = 2'-O-methylcytidine-3'-phosphorothioate
  modified_base 22: mod_base = OTHER; note = 2'-O-methyluridine-3'-phosphorothioate
  modified_base 23: mod_base = OTHER; note = 2'-O-methyladenosine
aactgtcccttttaagcaaccta

SEQ ID NO: 778 - RNA, 23 nt, synthetic construct
  source 1..23: mol_type = other RNA
  modified_base 1: mod_base = OTHER; note = 2'-O-methyladenosine-3'-phosphorothioate
  modified_base 2: mod_base = OTHER; note = 2'-deoxy-2'-fluoroadenosine-3'-phosphorothioate
  modified_base 3: mod_base = OTHER; note = 2'-O-methylcytidine-3'-phosphate
  modified_base 4: mod_base = OTHER; note = 2'-O-methylguanosine-3'-phosphate
  modified_base 5: mod_base = OTHER; note = 2'-O-methylguanosine-3'-phosphate
  modified_base 6: mod_base = OTHER; note = 2'-O-methyluridine-3'-phosphate
  modified_base 7: mod_base = OTHER; note = Guanosine-glycol nucleic acid (GNA), S-isomer
  modified_base 8: mod_base = OTHER; note = 2'-O-methylcytidine-3'-phosphate
  modified_base 9: mod_base = OTHER; note = 2'-O-methyluridine-3'-phosphate
  modified_base 10: mod_base = OTHER; note = 2'-O-methylcytidine-3'-phosphate
  modified_base 11: mod_base = OTHER; note = 2'-O-methylcytidine-3'-phosphate
  modified_base 12: mod_base = OTHER; note = 2'-O-methyladenosine-3'-phosphate
  modified_base 13: mod_base = OTHER; note = 2'-O-methylguanosine-3'-phosphate
  modified_base 14: mod_base = OTHER; note = 2'-deoxy-2'-fluorouridine-3'-phosphate
  modified_base 15: mod_base = OTHER; note = 2'-O-methyladenosine-3'-phosphate
  modified_base 16: mod_base = OTHER; note = 2'-deoxy-2'-fluoroguanosine-3'-phosphate
  modified_base 17: mod_base = OTHER; note = 2'-O-methyluridine-3'-phosphate
  modified_base 18: mod_base = OTHER; note = 2'-O-methylcytidine-3'-phosphate
  modified_base 19: mod_base = OTHER; note = 2'-O-methyluridine-3'-phosphate
  modified_base 20: mod_base = OTHER; note = 2'-O-methyluridine-3'-phosphate
  modified_base 21: mod_base = OTHER; note = 2'-O-methyluridine-3'-phosphorothioate
  modified_base 22: mod_base = OTHER; note = 2'-O-methylcytidine-3'-phosphorothioate
  modified_base 23: mod_base = OTHER; note = 2'-O-methyladenosine
aacggtgctccagtagtctttca

SEQ ID NO: 779 - RNA, 23 nt, synthetic construct
  source 1..23: mol_type = other RNA
  modified_base 1: mod_base = OTHER; note = 2'-O-methyladenosine-3'-phosphorothioate
  modified_base 2: mod_base = OTHER; note = 2'-deoxy-2'-fluorocytidine-3'-phosphorothioate
  modified_base 3: mod_base = OTHER; note = 2'-O-methylcytidine-3'-phosphate
  modified_base 4: mod_base = OTHER; note = 2'-O-methyluridine-3'-phosphate
  modified_base 5: mod_base = OTHER; note = 2'-O-methylcytidine-3'-phosphate
  modified_base 6: mod_base = OTHER; note = 2'-O-methylguanosine-3'-phosphate
  modified_base 7: mod_base = OTHER; note = Guanosine-glycol nucleic acid (GNA), S-isomer
  modified_base 8: mod_base = OTHER; note = 2'-O-methylcytidine-3'-phosphate
  modified_base 9: mod_base = OTHER; note = 2'-O-methylcytidine-3'-phosphate
  modified_base 10: mod_base = OTHER; note = 2'-O-methyluridine-3'-phosphate
  modified_base 11: mod_base = OTHER; note = 2'-O-methylcytidine-3'-phosphate
  modified_base 12: mod_base = OTHER; note = 2'-O-methyluridine-3'-phosphate
  modified_base 13: mod_base = OTHER; note = 2'-O-methylguanosine-3'-phosphate
  modified_base 14: mod_base = OTHER; note = 2'-deoxy-2'-fluoroadenosine-3'-phosphate
  modified_base 15: mod_base = OTHER; note = 2'-O-methyladenosine-3'-phosphate
  modified_base 16: mod_base = OTHER; note = 2'-deoxy-2'-fluoroguanosine-3'-phosphate
  modified_base 17: mod_base = OTHER; note = 2'-O-methylcytidine-3'-phosphate
  modified_base 18: mod_base = OTHER; note = 2'-O-methyluridine-3'-phosphate
  modified_base 19: mod_base = OTHER; note = 2'-O-methylcytidine-3'-phosphate
  modified_base 20: mod_base = OTHER; note = 2'-O-methylguanosine-3'-phosphate
  modified_base 21: mod_base = OTHER; note = 2'-O-methylguanosine-3'-phosphorothioate
  modified_base 22: mod_base = OTHER; note = 2'-O-methylguanosine-3'-phosphorothioate
  modified_base 23: mod_base = OTHER; note = 2'-O-methylcytidine
acctcggcctctgaagctcgggc

SEQ ID NO: 780 - RNA, 23 nt, synthetic construct
  source 1..23: mol_type = other RNA
  modified_base 1: mod_base = OTHER; note = 2'-O-methyladenosine-3'-phosphorothioate
  modified_base 2: mod_base = OTHER; note = 2'-deoxy-2'-fluoroadenosine-3'-phosphorothioate
  modified_base 3: mod_base = OTHER; note = 2'-O-methyluridine-3'-phosphate
  modified_base 4: mod_base = OTHER; note = 2'-O-methyluridine-3'-phosphate
  modified_base 5: mod_base = OTHER; note = 2'-O-methylguanosine-3'-phosphate
  modified_base 6: mod_base = OTHER; note = 2'-O-methyladenosine-3'-phosphate
  modified_base 7: mod_base = OTHER; note = Guanosine-glycol nucleic acid (GNA), S-isomer
  modified_base 8: mod_base = OTHER; note = 2'-O-methylguanosine-3'-phosphate
  modified_base 9: mod_base = OTHER; note = 2'-O-methyluridine-3'-phosphate
  modified_base 10: mod_base = OTHER; note = 2'-O-methylcytidine-3'-phosphate
  modified_base 11: mod_base = OTHER; note = 2'-O-methyluridine-3'-phosphate
  modified_base 12: mod_base = OTHER; note = 2'-O-methylcytidine-3'-phosphate
  modified_base 13: mod_base = OTHER; note = 2'-O-methyladenosine-3'-phosphate
  modified_base 14: mod_base = OTHER; note = 2'-deoxy-2'-fluoroguanosine-3'-phosphate
  modified_base 15: mod_base = OTHER; note = 2'-O-methylguanosine-3'-phosphate
  modified_base 16: mod_base = OTHER; note = 2'-deoxy-2'-fluorocytidine-3'-phosphate
  modified_base 17: mod_base = OTHER; note = 2'-O-methyladenosine-3'-phosphate
  modified_base 18: mod_base = OTHER; note = 2'-O-methylguanosine-3'-phosphate
  modified_base 19: mod_base = OTHER; note = 2'-O-methylcytidine-3'-phosphate
  modified_base 20: mod_base = OTHER; note = 2'-O-methylcytidine-3'-phosphate
  modified_base 21: mod_base = OTHER; note = 2'-O-methyladenosine-3'-phosphorothioate
  modified_base 22: mod_base = OTHER; note = 2'-O-methylcytidine-3'-phosphorothioate
  modified_base 23: mod_base = OTHER; note = 2'-O-methylguanosine
aattgaggtctcaggcagccacg

SEQ ID NO: 781 - RNA, 23 nt, synthetic construct
  source 1..23: mol_type = other RNA
  modified_base 1: mod_base = OTHER; note = 2'-O-methyladenosine-3'-phosphorothioate
  modified_base 2: mod_base = OTHER; note = 2'-deoxy-2'-fluorocytidine-3'-phosphorothioate
  modified_base 3: mod_base = OTHER; note = 2'-O-methyladenosine-3'-phosphate
  modified_base 4: mod_base = OTHER; note = 2'-O-methylguanosine-3'-phosphate
  modified_base 5: mod_base = OTHER; note = 2'-O-methylcytidine-3'-phosphate
  modified_base 6: mod_base = OTHER; note = 2'-O-methyluridine-3'-phosphate
  modified_base 7: mod_base = OTHER; note = Guanosine-glycol nucleic acid (GNA), S-isomer
  modified_base 8: mod_base = OTHER; note = 2'-O-methylcytidine-3'-phosphate
  modified_base 9: mod_base = OTHER; note = 2'-O-methylcytidine-3'-phosphate
  modified_base 10: mod_base = OTHER; note = 2'-O-methyluridine-3'-phosphate
  modified_base 11: mod_base = OTHER; note = 2'-O-methylcytidine-3'-phosphate
  modified_base 12: mod_base = OTHER; note = 2'-O-methyluridine-3'-phosphate
  modified_base 13: mod_base = OTHER; note = 2'-O-methyladenosine-3'-phosphate
  modified_base 14: mod_base = OTHER; note = 2'-deoxy-2'-fluoroguanosine-3'-phosphate
  modified_base 15: mod_base = OTHER; note = 2'-O-methylguanosine-3'-phosphate
  modified_base 16: mod_base = OTHER; note = 2'-deoxy-2'-fluoroguanosine-3'-phosphate
  modified_base 17: mod_base = OTHER; note = 2'-O-methyladenosine-3'-phosphate
  modified_base 18: mod_base = OTHER; note = 2'-O-methyluridine-3'-phosphate
  modified_base 19: mod_base = OTHER; note = 2'-O-methylguanosine-3'-phosphate
  modified_base 20: mod_base = OTHER; note = 2'-O-methyladenosine-3'-phosphate
  modified_base 21: mod_base = OTHER; note = 2'-O-methyladenosine-3'-phosphorothioate
  modified_base 22: mod_base = OTHER; note = 2'-O-methylcytidine-3'-phosphorothioate
  modified_base 23: mod_base = OTHER; note = 2'-O-methyluridine
acagctgcctctagggatgaact

SEQ ID NO: 782 - RNA, 23 nt, synthetic construct
  source 1..23: mol_type = other RNA
  modified_base 1: mod_base = OTHER; note = 2'-O-methyladenosine-3'-phosphorothioate
  modified_base 2: mod_base = OTHER; note = 2'-deoxy-2'-fluorocytidine-3'-phosphorothioate
  modified_base 3: mod_base = OTHER; note = 2'-O-methyluridine-3'-phosphate
  modified_base 4: mod_base = OTHER; note = 2'-O-methylguanosine-3'-phosphate
  modified_base 5: mod_base = OTHER; note = 2'-O-methylguanosine-3'-phosphate
  modified_base 6: mod_base = OTHER; note = 2'-O-methyladenosine-3'-phosphate
  modified_base 7: mod_base = OTHER; note = Guanosine-glycol nucleic acid (GNA), S-isomer
  modified_base 8: mod_base = OTHER; note = 2'-O-methylcytidine-3'-phosphate
  modified_base 9: mod_base = OTHER; note = 2'-O-methyladenosine-3'-phosphate
  modified_base 10: mod_base = OTHER; note = 2'-O-methylguanosine-3'-phosphate
  modified_base 11: mod_base = OTHER; note = 2'-O-methylcytidine-3'-phosphate
  modified_base 12: mod_base = OTHER; note = 2'-O-methyluridine-3'-phosphate
  modified_base 13: mod_base = OTHER; note = 2'-O-methylguanosine-3'-phosphate
  modified_base 14: mod_base = OTHER; note = 2'-deoxy-2'-fluorocytidine-3'-phosphate
  modified_base 15: mod_base = OTHER; note = 2'-O-methylcytidine-3'-phosphate
  modified_base 16: mod_base = OTHER; note = 2'-deoxy-2'-fluorouridine-3'-phosphate
  modified_base 17: mod_base = OTHER; note = 2'-O-methylcytidine-3'-phosphate
  modified_base 18: mod_base = OTHER; note = 2'-O-methyluridine-3'-phosphate
  modified_base 19: mod_base = OTHER; note = 2'-O-methyladenosine-3'-phosphate
  modified_base 20: mod_base = OTHER; note = 2'-O-methylguanosine-3'-phosphate
  modified_base 21: mod_base = OTHER; note = 2'-O-methylguanosine-3'-phosphorothioate
  modified_base 22: mod_base = OTHER; note = 2'-O-methylguanosine-3'-phosphorothioate
  modified_base 23: mod_base = OTHER; note = 2'-O-methyladenosine
actggagcagctgcctctaggga

SEQ ID NO: 783 - RNA, 23 nt, synthetic construct
  source 1..23: mol_type = other RNA
  modified_base 1: mod_base = OTHER; note = 2'-O-methyladenosine-3'-phosphorothioate
  modified_base 2: mod_base = OTHER; note = 2'-deoxy-2'-fluorocytidine-3'-phosphorothioate
  modified_base 3: mod_base = OTHER; note = 2'-O-methyluridine-3'-phosphate
  modified_base 4: mod_base = OTHER; note = 2'-O-methylguanosine-3'-phosphate
  modified_base 5: mod_base = OTHER; note = 2'-O-methyluridine-3'-phosphate
  modified_base 6: mod_base = OTHER; note = 2'-O-methylcytidine-3'-phosphate
  modified_base 7: mod_base = OTHER; note = Cytidine-glycol nucleic acid (GNA), S-isomer
  modified_base 8: mod_base = OTHER; note = 2'-O-methylcytidine-3'-phosphate
  modified_base 9: mod_base = OTHER; note = 2'-O-methyluridine-3'-phosphate
  modified_base 10: mod_base = OTHER; note = 2'-O-methyluridine-3'-phosphate
  modified_base 11: mod_base = OTHER; note = 2'-O-methyluridine-3'-phosphate
  modified_base 12: mod_base = OTHER; note = 2'-O-methyluridine-3'-phosphate
  modified_base 13: mod_base = OTHER; note = 2'-O-methyladenosine-3'-phosphate
  modified_base 14: mod_base = OTHER; note = 2'-deoxy-2'-fluoroadenosine-3'-phosphate
  modified_base 15: mod_base = OTHER; note = 2'-O-methylguanosine-3'-phosphate
  modified_base 16: mod_base = OTHER; note = 2'-deoxy-2'-fluorocytidine-3'-phosphate
  modified_base 17: mod_base = OTHER; note = 2'-O-methyladenosine-3'-phosphate
  modified_base 18: mod_base = OTHER; note = 2'-O-methyladenosine-3'-phosphate
  modified_base 19: mod_base = OTHER; note = 2'-O-methylcytidine-3'-phosphate
  modified_base 20: mod_base = OTHER; note = 2'-O-methylcytidine-3'-phosphate
  modified_base 21: mod_base = OTHER; note = 2'-O-methyluridine-3'-phosphorothioate
  modified_base 22: mod_base = OTHER; note = 2'-O-methyladenosine-3'-phosphorothioate
  modified_base 23: mod_base = OTHER; note = 2'-O-methylcytidine
actgtcccttttaagcaacctac

SEQ ID NO: 784 - RNA, 23 nt, synthetic construct
  source 1..23: mol_type = other RNA
  modified_base 1: mod_base = OTHER; note = 2'-O-methyladenosine-3'-phosphorothioate
  modified_base 2: mod_base = OTHER; note = 2'-deoxy-2'-fluorocytidine-3'-phosphorothioate
  modified_base 3: mod_base = OTHER; note = 2'-O-methylcytidine-3'-phosphate
  modified_base 4: mod_base = OTHER; note = 2'-O-methylcytidine-3'-phosphate
  modified_base 5: mod_base = OTHER; note = 2'-O-methyluridine-3'-phosphate
  modified_base 6: mod_base = OTHER; note = 2'-O-methyluridine-3'-phosphate
  modified_base 7: mod_base = OTHER; note = Thymidine-glycol nucleic acid (GNA), S-Isomer
  modified_base 8: mod_base = OTHER; note = 2'-O-methyluridine-3'-phosphate
  modified_base 9: mod_base = OTHER; note = 2'-O-methyladenosine-3'-phosphate
  modified_base 10: mod_base = OTHER; note = 2'-O-methyladenosine-3'-phosphate
  modified_base 11: mod_base = OTHER; note = 2'-O-methylguanosine-3'-phosphate
  modified_base 12: mod_base = OTHER; note = 2'-O-methylcytidine-3'-phosphate
  modified_base 13: mod_base = OTHER; note = 2'-O-methyladenosine-3'-phosphate
  modified_base 14: mod_base = OTHER; note = 2'-deoxy-2'-fluoroadenosine-3'-phosphate
  modified_base 15: mod_base = OTHER; note = 2'-O-methylcytidine-3'-phosphate
  modified_base 16: mod_base = OTHER; note = 2'-deoxy-2'-fluorocytidine-3'-phosphate
  modified_base 17: mod_base = OTHER; note = 2'-O-methyluridine-3'-phosphate
  modified_base 18: mod_base = OTHER; note = 2'-O-methyladenosine-3'-phosphate
  modified_base 19: mod_base = OTHER; note = 2'-O-methylcytidine-3'-phosphate
  modified_base 20: mod_base = OTHER; note = 2'-O-methyladenosine-3'-phosphate
  modified_base 21: mod_base = OTHER; note = 2'-O-methylguanosine-3'-phosphorothioate
  modified_base 22: mod_base = OTHER; note = 2'-O-methylguanosine-3'-phosphorothioate
  modified_base 23: mod_base = OTHER; note = 2'-O-methylguanosine
acccttttaagcaacctacaggg

SEQ ID NO: 785 - RNA, 23 nt, synthetic construct
  source 1..23: mol_type = other RNA
  modified_base 1: mod_base = OTHER; note = 2'-O-methyladenosine-3'-phosphorothioate
  modified_base 2: mod_base = OTHER; note = 2'-deoxy-2'-fluorocytidine-3'-phosphorothioate
  modified_base 3: mod_base = OTHER; note = 2'-O-methylguanosine-3'-phosphate
  modified_base 4: mod_base = OTHER; note = 2'-O-methylguanosine-3'-phosphate
  modified_base 5: mod_base = OTHER; note = 2'-O-methyluridine-3'-phosphate
  modified_base 6: mod_base = OTHER; note = 2'-O-methylguanosine-3'-phosphate
  modified_base 7: mod_base = OTHER; note = Cytidine-glycol nucleic acid (GNA), S-isomer
  modified_base 8: mod_base = OTHER; note = 2'-O-methyluridine-3'-phosphate
  modified_base 9: mod_base = OTHER; note = 2'-O-methylcytidine-3'-phosphate
  modified_base 10: mod_base = OTHER; note = 2'-O-methylcytidine-3'-phosphate
  modified_base 11: mod_base = OTHER; note = 2'-O-methyladenosine-3'-phosphate
  modified_base 12: mod_base = OTHER; note = 2'-O-methylguanosine-3'-phosphate
  modified_base 13: mod_base = OTHER; note = 2'-O-methyluridine-3'-phosphate
  modified_base 14: mod_base = OTHER; note = 2'-deoxy-2'-fluoroadenosine-3'-phosphate
  modified_base 15: mod_base = OTHER; note = 2'-O-methylguanosine-3'-phosphate
  modified_base 16: mod_base = OTHER; note = 2'-deoxy-2'-fluorouridine-3'-phosphate
  modified_base 17: mod_base = OTHER; note = 2'-O-methylcytidine-3'-phosphate
  modified_base 18: mod_base = OTHER; note = 2'-O-methyluridine-3'-phosphate
  modified_base 19: mod_base = OTHER; note = 2'-O-methyluridine-3'-phosphate
  modified_base 20: mod_base = OTHER; note = 2'-O-methyluridine-3'-phosphate
  modified_base 21: mod_base = OTHER; note = 2'-O-methylcytidine-3'-phosphorothioate
  modified_base 22: mod_base = OTHER; note = 2'-O-methyladenosine-3'-phosphorothioate
  modified_base 23: mod_base = OTHER; note = 2'-O-methylguanosine
acggtgctccagtagtctttcag

SEQ ID NO: 786 - RNA, 23 nt, synthetic construct
  source 1..23: mol_type = other RNA
  modified_base 1: mod_base = OTHER; note = 2'-O-methyladenosine-3'-phosphorothioate
  modified_base 2: mod_base = OTHER; note = 2'-deoxy-2'-fluorocytidine-3'-phosphorothioate
  modified_base 3: mod_base = OTHER; note = 2'-O-methyluridine-3'-phosphate
  modified_base 4: mod_base = OTHER; note = 2'-O-methylguanosine-3'-phosphate
  modified_base 5: mod_base = OTHER; note = 2'-O-methyladenosine-3'-phosphate
  modified_base 6: mod_base = OTHER; note = 2'-O-methyladenosine-3'-phosphate
  modified_base 7: mod_base = OTHER; note = Guanosine-glycol nucleic acid (GNA), S-isomer
  modified_base 8: mod_base = OTHER; note = 2'-O-methylcytidine-3'-phosphate
  modified_base 9: mod_base = OTHER; note = 2'-O-methylcytidine-3'-phosphate
  modified_base 10: mod_base = OTHER; note = 2'-O-methyladenosine-3'-phosphate
  modified_base 11: mod_base = OTHER; note = 2'-O-methyluridine-3'-phosphate
  modified_base 12: mod_base = OTHER; note = 2'-O-methylcytidine-3'-phosphate
  modified_base 13: mod_base = OTHER; note = 2'-O-methylguanosine-3'-phosphate
  modified_base 14: mod_base = OTHER; note = 2'-deoxy-2'-fluoroguanosine-3'-phosphate
  modified_base 15: mod_base = OTHER; note = 2'-O-methyluridine-3'-phosphate
  modified_base 16: mod_base = OTHER; note = 2'-deoxy-2'-fluorocytidine-3'-phosphate
  modified_base 17: mod_base = OTHER; note = 2'-O-methyladenosine-3'-phosphate
  modified_base 18: mod_base = OTHER; note = 2'-O-methylcytidine-3'-phosphate
  modified_base 19: mod_base = OTHER; note = 2'-O-methylcytidine-3'-phosphate
  modified_base 20: mod_base = OTHER; note = 2'-O-methylcytidine-3'-phosphate
  modified_base 21: mod_base = OTHER; note = 2'-O-methyladenosine-3'-phosphorothioate
  modified_base 22: mod_base = OTHER; note = 2'-O-methylguanosine-3'-phosphorothioate
  modified_base 23: mod_base = OTHER; note = 2'-O-methylcytidine
actgaagccatcggtcacccagc

SEQ ID NO: 787 - RNA, 23 nt, synthetic construct
  source 1..23: mol_type = other RNA
  modified_base 1: mod_base = OTHER; note = 2'-O-methyladenosine-3'-phosphorothioate
  modified_base 2: mod_base = OTHER; note = 2'-deoxy-2'-fluorocytidine-3'-phosphorothioate
  modified_base 3: mod_base = OTHER; note = 2'-O-methylcytidine-3'-phosphate
  modified_base 4: mod_base = OTHER; note = 2'-O-methyladenosine-3'-phosphate
  modified_base 5: mod_base = OTHER; note = 2'-O-methylguanosine-3'-phosphate
  modified_base 6: mod_base = OTHER; note = 2'-O-methyluridine-3'-phosphate
  modified_base 7: mod_base = OTHER; note = Adenosine-glycol nucleic acid (GNA), S-isomer
  modified_base 8: mod_base = OTHER; note = 2'-O-methylguanosine-3'-phosphate
  modified_base 9: mod_base = OTHER; note = 2'-O-methyluridine-3'-phosphate
  modified_base 10: mod_base = OTHER; note = 2'-O-methylcytidine-3'-phosphate
  modified_base 11: mod_base = OTHER; note = 2'-O-methyluridine-3'-phosphate
  modified_base 12: mod_base = OTHER; note = 2'-O-methyluridine-3'-phosphate
  modified_base 13: mod_base = OTHER; note = 2'-O-methyluridine-3'-phosphate
  modified_base 14: mod_base = OTHER; note = 2'-deoxy-2'-fluorocytidine-3'-phosphate
  modified_base 15: mod_base = OTHER; note = 2'-O-methyladenosine-3'-phosphate
  modified_base 16: mod_base = OTHER; note = 2'-deoxy-2'-fluoroguanosine-3'-phosphate
  modified_base 17: mod_base = OTHER; note = 2'-O-methylguanosine-3'-phosphate
  modified_base 18: mod_base = OTHER; note = 2'-O-methylguanosine-3'-phosphate
  modified_base 19: mod_base = OTHER; note = 2'-O-methyladenosine-3'-phosphate
  modified_base 20: mod_base = OTHER; note = 2'-O-methyladenosine-3'-phosphate
  modified_base 21: mod_base = OTHER; note = 2'-O-methylcytidine-3'-phosphorothioate
  modified_base 22: mod_base = OTHER; note = 2'-O-methyluridine-3'-phosphorothioate
  modified_base 23: mod_base = OTHER; note = 2'-O-methylguanosine
accagtagtctttcagggaactg

SEQ ID NO: 788 - RNA, 23 nt, synthetic construct
  source 1..23: mol_type = other RNA
  modified_base 1: mod_base = OTHER; note = 2'-O-methyladenosine-3'-phosphorothioate
  modified_base 2: mod_base = OTHER; note = 2'-deoxy-2'-fluoroguanosine-3'-phosphorothioate
  modified_base 3: mod_base = OTHER; note = 2'-O-methylguanosine-3'-phosphate
  modified_base 4: mod_base = OTHER; note = 2'-O-methylguanosine-3'-phosphate
  modified_base 5: mod_base = OTHER; note = 2'-O-methyladenosine-3'-phosphate
  modified_base 6: mod_base = OTHER; note = 2'-O-methyladenosine-3'-phosphate
  modified_base 7: mod_base = OTHER; note = Cytidine-glycol nucleic acid (GNA), S-isomer
  modified_base 8: mod_base = OTHER; note = 2'-O-methyluridine-3'-phosphate
  modified_base 9: mod_base = OTHER; note = 2'-O-methylguanosine-3'-phosphate
  modified_base 10: mod_base = OTHER; note = 2'-O-methyladenosine-3'-phosphate
  modified_base 11: mod_base = OTHER; note = 2'-O-methyladenosine-3'-phosphate
  modified_base 12: mod_base = OTHER; note = 2'-O-methylguanosine-3'-phosphate
  modified_base 13: mod_base = OTHER; note = 2'-O-methylcytidine-3'-phosphate
  modified_base 14: mod_base = OTHER; note = 2'-deoxy-2'-fluorocytidine-3'-phosphate
  modified_base 15: mod_base = OTHER; note = 2'-O-methyladenosine-3'-phosphate
  modified_base 16: mod_base = OTHER; note = 2'-deoxy-2'-fluorouridine-3'-phosphate
  modified_base 17: mod_base = OTHER; note = 2'-O-methylcytidine-3'-phosphate
  modified_base 18: mod_base = OTHER; note = 2'-O-methylguanosine-3'-phosphate
  modified_base 19: mod_base = OTHER; note = 2'-O-methylguanosine-3'-phosphate
  modified_base 20: mod_base = OTHER; note = 2'-O-methyluridine-3'-phosphate
  modified_base 21: mod_base = OTHER; note = 2'-O-methylcytidine-3'-phosphorothioate
  modified_base 22: mod_base = OTHER; note = 2'-O-methyladenosine-3'-phosphorothioate
  modified_base 23: mod_base = OTHER; note = 2'-O-methylcytidine
agggaactgaagccatcggtcac

SEQ ID NO: 789 - RNA, 23 nt, synthetic construct
  source 1..23: mol_type = other RNA
  modified_base 1: mod_base = OTHER; note = 2'-O-methyladenosine-3'-phosphorothioate
  modified_base 2: mod_base = OTHER; note = 2'-deoxy-2'-fluoroguanosine-3'-phosphorothioate
  modified_base 3: mod_base = OTHER; note = 2'-O-methyluridine-3'-phosphate
  modified_base 4: mod_base = OTHER; note = 2'-O-methylcytidine-3'-phosphate
  modified_base 5: mod_base = OTHER; note = 2'-O-methylcytidine-3'-phosphate
  modified_base 6: mod_base = OTHER; note = 2'-O-methyluridine-3'-phosphate
  modified_base 7: mod_base = OTHER; note = Thymidine-glycol nucleic acid (GNA), S-Isomer
  modified_base 8: mod_base = OTHER; note = 2'-O-methyladenosine-3'-phosphate
  modified_base 9: mod_base = OTHER; note = 2'-O-methyladenosine-3'-phosphate
  modified_base 10: mod_base = OTHER; note = 2'-O-methylcytidine-3'-phosphate
  modified_base 11: mod_base = OTHER; note = 2'-O-methylguanosine-3'-phosphate
  modified_base 12: mod_base = OTHER; note = 2'-O-methylguanosine-3'-phosphate
  modified_base 13: mod_base = OTHER; note = 2'-O-methyluridine-3'-phosphate
  modified_base 14: mod_base = OTHER; note = 2'-deoxy-2'-fluoroguanosine-3'-phosphate
  modified_base 15: mod_base = OTHER; note = 2'-O-methylcytidine-3'-phosphate
  modified_base 16: mod_base = OTHER; note = 2'-deoxy-2'-fluorouridine-3'-phosphate
  modified_base 17: mod_base = OTHER; note = 2'-O-methylcytidine-3'-phosphate
  modified_base 18: mod_base = OTHER; note = 2'-O-methylcytidine-3'-phosphate
  modified_base 19: mod_base = OTHER; note = 2'-O-methyladenosine-3'-phosphate
  modified_base 20: mod_base = OTHER; note = 2'-O-methylguanosine-3'-phosphate
  modified_base 21: mod_base = OTHER; note = 2'-O-methyluridine-3'-phosphorothioate
  modified_base 22: mod_base = OTHER; note = 2'-O-methyladenosine-3'-phosphorothioate
  modified_base 23: mod_base = OTHER; note = 2'-O-methylguanosine
agtccttaacggtgctccagtag

SEQ ID NO: 790 - RNA, 23 nt, synthetic construct
  source 1..23: mol_type = other RNA
  modified_base 1: mod_base = OTHER; note = 2'-O-methyladenosine-3'-phosphorothioate
  modified_base 2: mod_base = OTHER; note = 2'-deoxy-2'-fluoroguanosine-3'-phosphorothioate
  modified_base 3: mod_base = OTHER; note = 2'-O-methyluridine-3'-phosphate
  modified_base 4: mod_base = OTHER; note = 2'-O-methylcytidine-3'-phosphate
  modified_base 5: mod_base = OTHER; note = 2'-O-methylcytidine-3'-phosphate
  modified_base 6: mod_base = OTHER; note = 2'-O-methylcytidine-3'-phosphate
  modified_base 7: mod_base = OTHER; note = Thymidine-glycol nucleic acid (GNA), S-Isomer
  modified_base 8: mod_base = OTHER; note = 2'-O-methyluridine-3'-phosphate
  modified_base 9: mod_base = OTHER; note = 2'-O-methyluridine-3'-phosphate
  modified_base 10: mod_base = OTHER; note = 2'-O-methyluridine-3'-phosphate
  modified_base 11: mod_base = OTHER; note = 2'-O-methyladenosine-3'-phosphate
  modified_base 12: mod_base = OTHER; note = 2'-O-methyladenosine-3'-phosphate
  modified_base 13: mod_base = OTHER; note = 2'-O-methylguanosine-3'-phosphate
  modified_base 14: mod_base = OTHER; note = 2'-deoxy-2'-fluorocytidine-3'-phosphate
  modified_base 15: mod_base = OTHER; note = 2'-O-methyladenosine-3'-phosphate
  modified_base 16: mod_base = OTHER; note = 2'-deoxy-2'-fluoroadenosine-3'-phosphate
  modified_base 17: mod_base = OTHER; note = 2'-O-methylcytidine-3'-phosphate
  modified_base 18: mod_base = OTHER; note = 2'-O-methylcytidine-3'-phosphate
  modified_base 19: mod_base = OTHER; note = 2'-O-methyluridine-3'-phosphate
  modified_base 20: mod_base = OTHER; note = 2'-O-methyladenosine-3'-phosphate
  modified_base 21: mod_base = OTHER; note = 2'-O-methylcytidine-3'-phosphorothioate
  modified_base 22: mod_base = OTHER; note = 2'-O-methyladenosine-3'-phosphorothioate
  modified_base 23: mod_base = OTHER; note = 2'-O-methylguanosine
agtcccttttaagcaacctacag

SEQ ID NO: 791 - RNA, 23 nt, synthetic construct
  source 1..23: mol_type = other RNA
  modified_base 1: mod_base = OTHER; note = 2'-O-methyladenosine-3'-phosphorothioate
  modified_base 2: mod_base = OTHER; note = 2'-deoxy-2'-fluorocytidine-3'-phosphorothioate
  modified_base 3: mod_base = OTHER; note = 2'-O-methyluridine-3'-phosphate
  modified_base 4: mod_base = OTHER; note = 2'-O-methylcytidine-3'-phosphate
  modified_base 5: mod_base = OTHER; note = 2'-O-methyluridine-3'-phosphate
  modified_base 6: mod_base = OTHER; note = 2'-O-methylguanosine-3'-phosphate
  modified_base 7: mod_base = OTHER; note = Thymidine-glycol nucleic acid (GNA), S-Isomer
  modified_base 8: mod_base = OTHER; note = 2'-O-methyluridine-3'-phosphate
  modified_base 9: mod_base = OTHER; note = 2'-O-methylcytidine-3'-phosphate
  modified_base 10: mod_base = OTHER; note = 2'-O-methylcytidine-3'-phosphate
  modified_base 11: mod_base = OTHER; note = 2'-O-methyluridine-3'-phosphate
  modified_base 12: mod_base = OTHER; note = 2'-O-methylguanosine-3'-phosphate
  modified_base 13: mod_base = OTHER; note = 2'-O-methylguanosine-3'-phosphate
  modified_base 14: mod_base = OTHER; note = 2'-deoxy-2'-fluoroadenosine-3'-phosphate
  modified_base 15: mod_base = OTHER; note = 2'-O-methylguanosine-3'-phosphate
  modified_base 16: mod_base = OTHER; note = 2'-deoxy-2'-fluorocytidine-3'-phosphate
  modified_base 17: mod_base = OTHER; note = 2'-O-methyladenosine-3'-phosphate
  modified_base 18: mod_base = OTHER; note = 2'-O-methylguanosine-3'-phosphate
  modified_base 19: mod_base = OTHER; note = 2'-O-methylcytidine-3'-phosphate
  modified_base 20: mod_base = OTHER; note = 2'-O-methyluridine-3'-phosphate
  modified_base 21: mod_base = OTHER; note = 2'-O-methylguanosine-3'-phosphorothioate
  modified_base 22: mod_base = OTHER; note = 2'-O-methylcytidine-3'-phosphorothioate
  modified_base 23: mod_base = OTHER; note = 2'-O-methylcytidine
actctgttcctggagcagctgcc

SEQ ID NO: 792 - RNA, 23 nt, synthetic construct
  source 1..23: mol_type = other RNA
  modified_base 1: mod_base = OTHER; note = 2'-O-methyladenosine-3'-phosphorothioate
  modified_base 2: mod_base = OTHER; note = 2'-deoxy-2'-fluorouridine-3'-phosphorothioate
  modified_base 3: mod_base = OTHER; note = 2'-O-methyluridine-3'-phosphate
  modified_base 4: mod_base = OTHER; note = 2'-O-methylcytidine-3'-phosphate
  modified_base 5: mod_base = OTHER; note = 2'-O-methylcytidine-3'-phosphate
  modified_base 6: mod_base = OTHER; note = 2'-O-methyluridine-3'-phosphate
  modified_base 7: mod_base = OTHER; note = Guanosine-glycol nucleic acid (GNA), S-isomer
  modified_base 8: mod_base = OTHER; note = 2'-O-methylguanosine-3'-phosphate
  modified_base 9: mod_base = OTHER; note = 2'-O-methyladenosine-3'-phosphate
  modified_base 10: mod_base = OTHER; note = 2'-O-methylguanosine-3'-phosphate
  modified_base 11: mod_base = OTHER; note = 2'-O-methylcytidine-3'-phosphate
  modified_base 12: mod_base = OTHER; note = 2'-O-methyladenosine-3'-phosphate
  modified_base 13: mod_base = OTHER; note = 2'-O-methylguanosine-3'-phosphate
  modified_base 14: mod_base = OTHER; note = 2'-deoxy-2'-fluorocytidine-3'-phosphate
  modified_base 15: mod_base = OTHER; note = 2'-O-methyluridine-3'-phosphate
  modified_base 16: mod_base = OTHER; note = 2'-deoxy-2'-fluoroguanosine-3'-phosphate
  modified_base 17: mod_base = OTHER; note = 2'-O-methylcytidine-3'-phosphate
  modified_base 18: mod_base = OTHER; note = 2'-O-methylcytidine-3'-phosphate
  modified_base 19: mod_base = OTHER; note = 2'-O-methyluridine-3'-phosphate
  modified_base 20: mod_base = OTHER; note = 2'-O-methylcytidine-3'-phosphate
  modified_base 21: mod_base = OTHER; note = 2'-O-methyluridine-3'-phosphorothioate
  modified_base 22: mod_base = OTHER; note = 2'-O-methyladenosine-3'-phosphorothioate
  modified_base 23: mod_base = OTHER; note = 2'-O-methylguanosine
attcctggagcagctgcctctag

SEQ ID NO: 793 - RNA, 23 nt, synthetic construct
  source 1..23: mol_type = other RNA
  modified_base 1: mod_base = OTHER; note = 2'-O-methyladenosine-3'-phosphorothioate
  modified_base 2: mod_base = OTHER; note = 2'-deoxy-2'-fluoroadenosine-3'-phosphorothioate
  modified_base 3: mod_base = OTHER; note = 2'-O-methyluridine-3'-phosphate
  modified_base 4: mod_base = OTHER; note = 2'-O-methyladenosine-3'-phosphate
  modified_base 5: mod_base = OTHER; note = 2'-O-methylcytidine-3'-phosphate
  modified_base 6: mod_base = OTHER; note = 2'-O-methyluridine-3'-phosphate
  modified_base 7: mod_base = OTHER; note = Guanosine-glycol nucleic acid (GNA), S-isomer
  modified_base 8: mod_base = OTHER; note = 2'-O-methyluridine-3'-phosphate
  modified_base 9: mod_base = OTHER; note = 2'-O-methylcytidine-3'-phosphate
  modified_base 10: mod_base = OTHER; note = 2'-O-methylcytidine-3'-phosphate
  modified_base 11: mod_base = OTHER; note = 2'-O-methylcytidine-3'-phosphate
  modified_base 12: mod_base = OTHER; note = 2'-O-methyluridine-3'-phosphate
  modified_base 13: mod_base = OTHER; note = 2'-O-methyluridine-3'-phosphate
  modified_base 14: mod_base = OTHER; note = 2'-deoxy-2'-fluorouridine-3'-phosphate
  modified_base 15: mod_base = OTHER; note = 2'-O-methyluridine-3'-phosphate
  modified_base 16: mod_base = OTHER; note = 2'-deoxy-2'-fluoroadenosine-3'-phosphate
  modified_base 17: mod_base = OTHER; note = 2'-O-methyladenosine-3'-phosphate
  modified_base 18: mod_base = OTHER; note = 2'-O-methylguanosine-3'-phosphate
  modified_base 19: mod_base = OTHER; note = 2'-O-methylcytidine-3'-phosphate
  modified_base 20: mod_base = OTHER; note = 2'-O-methyladenosine-3'-phosphate
  modified_base 21: mod_base = OTHER; note = 2'-O-methyladenosine-3'-phosphorothioate
  modified_base 22: mod_base = OTHER; note = 2'-O-methylcytidine-3'-phosphorothioate
  modified_base 23: mod_base = OTHER; note = 2'-O-methylcytidine
aatactgtcccttttaagcaacc

SEQ ID NO: 794 - RNA, 23 nt, synthetic construct
  source 1..23: mol_type = other RNA
ggttgcttaaaagggacagtatt

SEQ ID NO: 795 - RNA, 23 nt, synthetic construct
  source 1..23: mol_type = other RNA
  modified_base 1: mod_base = OTHER; note = 2'-O-methyladenosine-3'-phosphorothioate
  modified_base 2: mod_base = OTHER; note = 2'-deoxy-2'-fluorouridine-3'-phosphorothioate
  modified_base 3: mod_base = OTHER; note = 2'-O-methyluridine-3'-phosphate
  modified_base 4: mod_base = OTHER; note = 2'-O-methylguanosine-3'-phosphate
  modified_base 5: mod_base = OTHER; note = 2'-O-methyluridine-3'-phosphate
  modified_base 6: mod_base = OTHER; note = 2'-O-methylcytidine-3'-phosphate
  modified_base 7: mod_base = OTHER; note = Cytidine-glycol nucleic acid (GNA), S-isomer
  modified_base 8: mod_base = OTHER; note = 2'-O-methyluridine-3'-phosphate
  modified_base 9: mod_base = OTHER; note = 2'-O-methyluridine-3'-phosphate
  modified_base 10: mod_base = OTHER; note = 2'-O-methyladenosine-3'-phosphate
  modified_base 11: mod_base = OTHER; note = 2'-O-methyladenosine-3'-phosphate
  modified_base 12: mod_base = OTHER; note = 2'-O-methylcytidine-3'-phosphate
  modified_base 13: mod_base = OTHER; note = 2'-O-methylguanosine-3'-phosphate
  modified_base 14: mod_base = OTHER; note = 2'-deoxy-2'-fluoroguanosine-3'-phosphate
  modified_base 15: mod_base = OTHER; note = 2'-O-methyluridine-3'-phosphate
  modified_base 16: mod_base = OTHER; note = 2'-deoxy-2'-fluoroguanosine-3'-phosphate
  modified_base 17: mod_base = OTHER; note = 2'-O-methylcytidine-3'-phosphate
  modified_base 18: mod_base = OTHER; note = 2'-O-methyluridine-3'-phosphate
  modified_base 19: mod_base = OTHER; note = 2'-O-methylcytidine-3'-phosphate
  modified_base 20: mod_base = OTHER; note = 2'-O-methylcytidine-3'-phosphate
  modified_base 21: mod_base = OTHER; note = 2'-O-methyladenosine-3'-phosphorothioate
  modified_base 22: mod_base = OTHER; note = 2'-O-methylguanosine-3'-phosphorothioate
  modified_base 23: mod_base = OTHER; note = 2'-O-methyluridine
attgtccttaacggtgctccagt

SEQ ID NO: 796 - RNA, 23 nt, synthetic construct
  source 1..23: mol_type = other RNA
  modified_base 1: mod_base = OTHER; note = 2'-O-methyladenosine-3'-phosphorothioate
  modified_base 2: mod_base = OTHER; note = 2'-deoxy-2'-fluorocytidine-3'-phosphorothioate
  modified_base 3: mod_base = OTHER; note = 2'-O-methylcytidine-3'-phosphate
  modified_base 4: mod_base = OTHER; note = 2'-O-methyluridine-3'-phosphate
  modified_base 5: mod_base = OTHER; note = 2'-O-methylguanosine-3'-phosphate
  modified_base 6: mod_base = OTHER; note = 2'-O-methylguanosine-3'-phosphate
  modified_base 7: mod_base = OTHER; note = Adenosine-glycol nucleic acid (GNA), S-isomer
  modified_base 8: mod_base = OTHER; note = 2'-O-methylguanosine-3'-phosphate
  modified_base 9: mod_base = OTHER; note = 2'-O-methylcytidine-3'-phosphate
  modified_base 10: mod_base = OTHER; note = 2'-O-methyladenosine-3'-phosphate
  modified_base 11: mod_base = OTHER; note = 2'-O-methylguanosine-3'-phosphate
  modified_base 12: mod_base = OTHER; note = 2'-O-methylcytidine-3'-phosphate
  modified_base 13: mod_base = OTHER; note = 2'-O-methyluridine-3'-phosphate
  modified_base 14: mod_base = OTHER; note = 2'-deoxy-2'-fluoroguanosine-3'-phosphate
  modified_base 15: mod_base = OTHER; note = 2'-O-methylcytidine-3'-phosphate
  modified_base 16: mod_base = OTHER; note = 2'-deoxy-2'-fluorocytidine-3'-phosphate
  modified_base 17: mod_base = OTHER; note = 2'-O-methyluridine-3'-phosphate
  modified_base 18: mod_base = OTHER; note = 2'-O-methylcytidine-3'-phosphate
  modified_base 19: mod_base = OTHER; note = 2'-O-methyluridine-3'-phosphate
  modified_base 20: mod_base = OTHER; note = 2'-O-methyladenosine-3'-phosphate
  modified_base 21: mod_base = OTHER; note = 2'-O-methylguanosine-3'-phosphorothioate
  modified_base 22: mod_base = OTHER; note = 2'-O-methylguanosine-3'-phosphorothioate
  modified_base 23: mod_base = OTHER; note = 2'-O-methylguanosine
acctggagcagctgcctctaggg

SEQ ID NO: 797 - RNA, 23 nt, synthetic construct
  source 1..23: mol_type = other RNA
  modified_base 1: mod_base = OTHER; note = 2'-O-methyladenosine-3'-phosphorothioate
  modified_base 2: mod_base = OTHER; note = 2'-deoxy-2'-fluorocytidine-3'-phosphorothioate
  modified_base 3: mod_base = OTHER; note = 2'-O-methylcytidine-3'-phosphate
  modified_base 4: mod_base = OTHER; note = 2'-O-methyluridine-3'-phosphate
  modified_base 5: mod_base = OTHER; note = 2'-O-methyluridine-3'-phosphate
  modified_base 6: mod_base = OTHER; note = 2'-O-methyladenosine-3'-phosphate
  modified_base 7: mod_base = OTHER; note = Adenosine-glycol nucleic acid (GNA), S-isomer
  modified_base 8: mod_base = OTHER; note = 2'-O-methylcytidine-3'-phosphate
  modified_base 9: mod_base = OTHER; note = 2'-O-methylguanosine-3'-phosphate
  modified_base 10: mod_base = OTHER; note = 2'-O-methylguanosine-3'-phosphate
  modified_base 11: mod_base = OTHER; note = 2'-O-methyluridine-3'-phosphate
  modified_base 12: mod_base = OTHER; note = 2'-O-methylguanosine-3'-phosphate
  modified_base 13: mod_base = OTHER; note = 2'-O-methylcytidine-3'-phosphate
  modified_base 14: mod_base = OTHER; note = 2'-deoxy-2'-fluorouridine-3'-phosphate
  modified_base 15: mod_base = OTHER; note = 2'-O-methylcytidine-3'-phosphate
  modified_base 16: mod_base = OTHER; note = 2'-deoxy-2'-fluorocytidine-3'-phosphate
  modified_base 17: mod_base = OTHER; note = 2'-O-methyladenosine-3'-phosphate
  modified_base 18: mod_base = OTHER; note = 2'-O-methylguanosine-3'-phosphate
  modified_base 19: mod_base = OTHER; note = 2'-O-methyluridine-3'-phosphate
  modified_base 20: mod_base = OTHER; note = 2'-O-methyladenosine-3'-phosphate
  modified_base 21: mod_base = OTHER; note = 2'-O-methylguanosine-3'-phosphorothioate
  modified_base 22: mod_base = OTHER; note = 2'-O-methyluridine-3'-phosphorothioate
  modified_base 23: mod_base = OTHER; note = 2'-O-methylcytidine
accttaacggtgctccagtagtc

SEQ ID NO: 798 - RNA, 23 nt, synthetic construct
  source 1..23: mol_type = other RNA
  modified_base 1: mod_base = OTHER; note = 2'-O-methyladenosine-3'-phosphorothioate
  modified_base 2: mod_base = OTHER; note = 2'-deoxy-2'-fluorouridine-3'-phosphorothioate
  modified_base 3: mod_base = OTHER; note = 2'-O-methylguanosine-3'-phosphate
  modified_base 4: mod_base = OTHER; note = 2'-O-methylcytidine-3'-phosphate
  modified_base 5: mod_base = OTHER; note = 2'-O-methyluridine-3'-phosphate
  modified_base 6: mod_base = OTHER; note = 2'-O-methylguanosine-3'-phosphate
  modified_base 7: mod_base = OTHER; note = Guanosine-glycol nucleic acid (GNA), S-isomer
  modified_base 8: mod_base = OTHER; note = 2'-O-methylguanosine-3'-phosphate
  modified_base 9: mod_base = OTHER; note = 2'-O-methylcytidine-3'-phosphate
  modified_base 10: mod_base = OTHER; note = 2'-O-methylcytidine-3'-phosphate
  modified_base 11: mod_base = OTHER; note = 2'-O-methyladenosine-3'-phosphate
  modified_base 12: mod_base = OTHER; note = 2'-O-methylcytidine-3'-phosphate
  modified_base 13: mod_base = OTHER; note = 2'-O-methylcytidine-3'-phosphate
  modified_base 14: mod_base = OTHER; note = 2'-deoxy-2'-fluorouridine-3'-phosphate
  modified_base 15: mod_base = OTHER; note = 2'-O-methylguanosine-3'-phosphate
  modified_base 16: mod_base = OTHER; note = 2'-deoxy-2'-fluoroguanosine-3'-phosphate
  modified_base 17: mod_base = OTHER; note = 2'-O-methylguanosine-3'-phosphate
  modified_base 18: mod_base = OTHER; note = 2'-O-methyladenosine-3'-phosphate
  modified_base 19: mod_base = OTHER; note = 2'-O-methylcytidine-3'-phosphate
  modified_base 20: mod_base = OTHER; note = 2'-O-methyluridine-3'-phosphate
  modified_base 21: mod_base = OTHER; note = 2'-O-methylcytidine-3'-phosphorothioate
  modified_base 22: mod_base = OTHER; note = 2'-O-methylcytidine-3'-phosphorothioate
  modified_base 23: mod_base = OTHER; note = 2'-O-methyluridine
atgctgggccacctgggactcct

SEQ ID NO: 799 - RNA, 23 nt, synthetic construct
  source 1..23: mol_type = other RNA
  modified_base 1: mod_base = OTHER; note = 2'-O-methyladenosine-3'-phosphorothioate
  modified_base 2: mod_base = OTHER; note = 2'-deoxy-2'-fluorouridine-3'-phosphorothioate
  modified_base 3: mod_base = OTHER; note = 2'-O-methylguanosine-3'-phosphate
  modified_base 4: mod_base = OTHER; note = 2'-O-methylcytidine-3'-phosphate
  modified_base 5: mod_base = OTHER; note = 2'-O-methyladenosine-3'-phosphate
  modified_base 6: mod_base = OTHER; note = 2'-O-methylguanosine-3'-phosphate
  modified_base 7: mod_base = OTHER; note = Guanosine-glycol nucleic acid (GNA), S-isomer
  modified_base 8: mod_base = OTHER; note = 2'-O-methyladenosine-3'-phosphate
  modified_base 9: mod_base = OTHER; note = 2'-O-methylcytidine-3'-phosphate
  modified_base 10: mod_base = OTHER; note = 2'-O-methylcytidine-3'-phosphate
  modified_base 11: mod_base = OTHER; note = 2'-O-methylcytidine-3'-phosphate
  modified_base 12: mod_base = OTHER; note = 2'-O-methyladenosine-3'-phosphate
  modified_base 13: mod_base = OTHER; note = 2'-O-methyladenosine-3'-phosphate
  modified_base 14: mod_base = OTHER; note = 2'-deoxy-2'-fluoroguanosine-3'-phosphate
  modified_base 15: mod_base = OTHER; note = 2'-O-methylguanosine-3'-phosphate
  modified_base 16: mod_base = OTHER; note = 2'-deoxy-2'-fluoroadenosine-3'-phosphate
  modified_base 17: mod_base = OTHER; note = 2'-O-methylguanosine-3'-phosphate
  modified_base 18: mod_base = OTHER; note = 2'-O-methylcytidine-3'-phosphate
  modified_base 19: mod_base = OTHER; note = 2'-O-methyluridine-3'-phosphate
  modified_base 20: mod_base = OTHER; note = 2'-O-methylcytidine-3'-phosphate
  modified_base 21: mod_base = OTHER; note = 2'-O-methylguanosine-3'-phosphorothioate
  modified_base 22: mod_base = OTHER; note = 2'-O-methylcytidine-3'-phosphorothioate
  modified_base 23: mod_base = OTHER; note = 2'-O-methyladenosine
atgcaggacccaaggagctcgca

SEQ ID NO: 800 - RNA, 23 nt, synthetic construct
  source 1..23: mol_type = other RNA
  modified_base 1: mod_base = OTHER; note = 2'-O-methyladenosine-3'-phosphorothioate
  modified_base 2: mod_base = OTHER; note = 2'-deoxy-2'-fluorocytidine-3'-phosphorothioate
  modified_base 3: mod_base = OTHER; note = 2'-O-methyladenosine-3'-phosphate
  modified_base 4: mod_base = OTHER; note = 2'-O-methylguanosine-3'-phosphate
  modified_base 5: mod_base = OTHER; note = 2'-O-methyluridine-3'-phosphate
  modified_base 6: mod_base = OTHER; note = 2'-O-methylguanosine-3'-phosphate
  modified_base 7: mod_base = OTHER; note = Cytidine-glycol nucleic acid (GNA), S-isomer
  modified_base 8: mod_base = OTHER; note = 2'-O-methyladenosine-3'-phosphate
  modified_base 9: mod_base = OTHER; note = 2'-O-methyluridine-3'-phosphate
  modified_base 10: mod_base = OTHER; note = 2'-O-methylcytidine-3'-phosphate
  modified_base 11: mod_base = OTHER; note = 2'-O-methylcytidine-3'-phosphate
  modified_base 12: mod_base = OTHER; note = 2'-O-methyluridine-3'-phosphate
  modified_base 13: mod_base = OTHER; note = 2'-O-methyluridine-3'-phosphate
  modified_base 14: mod_base = OTHER; note = 2'-deoxy-2'-fluoroguanosine-3'-phosphate
  modified_base 15: mod_base = OTHER; note = 2'-O-methylguanosine-3'-phosphate
  modified_base 16: mod_base = OTHER; note = 2'-deoxy-2'-fluorocytidine-3'-phosphate
  modified_base 17: mod_base = OTHER; note = 2'-O-methylguanosine-3'-phosphate
  modified_base 18: mod_base = OTHER; note = 2'-O-methylguanosine-3'-phosphate
  modified_base 19: mod_base = OTHER; note = 2'-O-methyluridine-3'-phosphate
  modified_base 20: mod_base = OTHER; note = 2'-O-methylcytidine-3'-phosphate
  modified_base 21: mod_base = OTHER; note = 2'-O-methyluridine-3'-phosphorothioate
  modified_base 22: mod_base = OTHER; note = 2'-O-methyluridine-3'-phosphorothioate
  modified_base 23: mod_base = OTHER; note = 2'-O-methylguanosine
acagtgcatccttggcggtcttg

SEQ ID NO: 801 - RNA, 23 nt, synthetic construct
  source 1..23: mol_type = other RNA
  modified_base 1: mod_base = OTHER; note = 2'-O-methyladenosine-3'-phosphorothioate
  modified_base 2: mod_base = OTHER; note = 2'-deoxy-2'-fluorocytidine-3'-phosphorothioate
  modified_base 3: mod_base = OTHER; note = 2'-O-methyladenosine-3'-phosphate
  modified_base 4: mod_base = OTHER; note = 2'-O-methylguanosine-3'-phosphate
  modified_base 5: mod_base = OTHER; note = 2'-O-methylguanosine-3'-phosphate
  modified_base 6: mod_base = OTHER; note = 2'-O-methylguanosine-3'-phosphate
  modified_base 7: mod_base = OTHER; note = Adenosine-glycol nucleic acid (GNA), S-isomer
  modified_base 8: mod_base = OTHER; note = 2'-O-methyladenosine-3'-phosphate
  modified_base 9: mod_base = OTHER; note = 2'-O-methylcytidine-3'-phosphate
  modified_base 10: mod_base = OTHER; note = 2'-O-methyluridine-3'-phosphate
  modified_base 11: mod_base = OTHER; note = 2'-O-methylguanosine-3'-phosphate
  modified_base 12: mod_base = OTHER; note = 2'-O-methyladenosine-3'-phosphate
  modified_base 13: mod_base = OTHER; note = 2'-O-methyladenosine-3'-phosphate
  modified_base 14: mod_base = OTHER; note = 2'-deoxy-2'-fluoroguanosine-3'-phosphate
  modified_base 15: mod_base = OTHER; note = 2'-O-methylcytidine-3'-phosphate
  modified_base 16: mod_base = OTHER; note = 2'-deoxy-2'-fluorocytidine-3'-phosphate
  modified_base 17: mod_base = OTHER; note = 2'-O-methyladenosine-3'-phosphate
  modified_base 18: mod_base = OTHER; note = 2'-O-methyluridine-3'-phosphate
  modified_base 19: mod_base = OTHER; note = 2'-O-methylcytidine-3'-phosphate
  modified_base 20: mod_base = OTHER; note = 2'-O-methylguanosine-3'-phosphate
  modified_base 21: mod_base = OTHER; note = 2'-O-methylguanosine-3'-phosphorothioate
  modified_base 22: mod_base = OTHER; note = 2'-O-methyluridine-3'-phosphorothioate
  modified_base 23: mod_base = OTHER; note = 2'-O-methylcytidine
acagggaactgaagccatcggtc

SEQ ID NO: 802 - RNA, 23 nt, synthetic construct
  source 1..23: mol_type = other RNA
  modified_base 1: mod_base = OTHER; note = 2'-O-methyladenosine-3'-phosphorothioate
  modified_base 2: mod_base = OTHER; note = 2'-deoxy-2'-fluoroadenosine-3'-phosphorothioate
  modified_base 3: mod_base = OTHER; note = 2'-O-methyladenosine-3'-phosphate
  modified_base 4: mod_base = OTHER; note = 2'-O-methylcytidine-3'-phosphate
  modified_base 5: mod_base = OTHER; note = 2'-O-methyluridine-3'-phosphate
  modified_base 6: mod_base = OTHER; note = 2'-O-methylguanosine-3'-phosphate
  modified_base 7: mod_base = OTHER; note = Adenosine-glycol nucleic acid (GNA), S-isomer
  modified_base 8: mod_base = OTHER; note = 2'-O-methyladenosine-3'-phosphate
  modified_base 9: mod_base = OTHER; note = 2'-O-methylguanosine-3'-phosphate
  modified_base 10: mod_base = OTHER; note = 2'-O-methylcytidine-3'-phosphate
  modified_base 11: mod_base = OTHER; note = 2'-O-methylcytidine-3'-phosphate
  modified_base 12: mod_base = OTHER; note = 2'-O-methyladenosine-3'-phosphate
  modified_base 13: mod_base = OTHER; note = 2'-O-methyluridine-3'-phosphate
  modified_base 14: mod_base = OTHER; note = 2'-deoxy-2'-fluorocytidine-3'-phosphate
  modified_base 15: mod_base = OTHER; note = 2'-O-methylguanosine-3'-phosphate
  modified_base 16: mod_base = OTHER; note = 2'-deoxy-2'-fluoroguanosine-3'-phosphate
  modified_base 17: mod_base = OTHER; note = 2'-O-methyluridine-3'-phosphate
  modified_base 18: mod_base = OTHER; note = 2'-O-methylcytidine-3'-phosphate
  modified_base 19: mod_base = OTHER; note = 2'-O-methyladenosine-3'-phosphate
  modified_base 20: mod_base = OTHER; note = 2'-O-methylcytidine-3'-phosphate
  modified_base 21: mod_base = OTHER; note = 2'-O-methylcytidine-3'-phosphorothioate
  modified_base 22: mod_base = OTHER; note = 2'-O-methylcytidine-3'-phosphorothioate
  modified_base 23: mod_base = OTHER; note = 2'-O-methyladenosine
aaactgaagccatcggtcaccca

SEQ ID NO: 803 - RNA, 23 nt, synthetic construct
  source 1..23: mol_type = other RNA
  modified_base 1: mod_base = OTHER; note = 2'-O-methyladenosine-3'-phosphorothioate
  modified_base 2: mod_base = OTHER; note = 2'-deoxy-2'-fluoroguanosine-3'-phosphorothioate
  modified_base 3: mod_base = OTHER; note = 2'-O-methyladenosine-3'-phosphate
  modified_base 4: mod_base = OTHER; note = 2'-O-methyladenosine-3'-phosphate
  modified_base 5: mod_base = OTHER; note = 2'-O-methylguanosine-3'-phosphate
  modified_base 6: mod_base = OTHER; note = 2'-O-methylcytidine-3'-phosphate
  modified_base 7: mod_base = OTHER; note = Cytidine-glycol nucleic acid (GNA), S-isomer
  modified_base 8: mod_base = OTHER; note = 2'-O-methyladenosine-3'-phosphate
  modified_base 9: mod_base = OTHER; note = 2'-O-methyluridine-3'-phosphate
  modified_base 10: mod_base = OTHER; note = 2'-O-methylcytidine-3'-phosphate
  modified_base 11: mod_base = OTHER; note = 2'-O-methylguanosine-3'-phosphate
  modified_base 12: mod_base = OTHER; note = 2'-O-methylguanosine-3'-phosphate
  modified_base 13: mod_base = OTHER; note = 2'-O-methyluridine-3'-phosphate
  modified_base 14: mod_base = OTHER; note = 2'-deoxy-2'-fluorocytidine-3'-phosphate
  modified_base 15: mod_base = OTHER; note = 2'-O-methyladenosine-3'-phosphate
  modified_base 16: mod_base = OTHER; note = 2'-deoxy-2'-fluorocytidine-3'-phosphate
  modified_base 17: mod_base = OTHER; note = 2'-O-methylcytidine-3'-phosphate
  modified_base 18: mod_base = OTHER; note = 2'-O-methylcytidine-3'-phosphate
  modified_base 19: mod_base = OTHER; note = 2'-O-methyladenosine-3'-phosphate
  modified_base 20: mod_base = OTHER; note = 2'-O-methylguanosine-3'-phosphate
  modified_base 21: mod_base = OTHER; note = 2'-O-methylcytidine-3'-phosphorothioate
  modified_base 22: mod_base = OTHER; note = 2'-O-methylcytidine-3'-phosphorothioate
  modified_base 23: mod_base = OTHER; note = 2'-O-methylcytidine
agaagccatcggtcacccagccc

SEQ ID NO: 804 - RNA, 23 nt, synthetic construct
  source 1..23: mol_type = other RNA
  modified_base 1: mod_base = OTHER; note = 2'-O-methyladenosine-3'-phosphorothioate
  modified_base 2: mod_base = OTHER; note = 2'-deoxy-2'-fluorouridine-3'-phosphorothioate
  modified_base 3: mod_base = OTHER; note = 2'-O-methylguanosine-3'-phosphate
  modified_base 4: mod_base = OTHER; note = 2'-O-methylguanosine-3'-phosphate
  modified_base 5: mod_base = OTHER; note = 2'-O-methylcytidine-3'-phosphate
  modified_base 6: mod_base = OTHER; note = 2'-O-methylcytidine-3'-phosphate
  modified_base 7: mod_base = OTHER; note = Thymidine-glycol nucleic acid (GNA), S-Isomer
  modified_base 8: mod_base = OTHER; note = 2'-O-methylguanosine-3'-phosphate
  modified_base 9: mod_base = OTHER; note = 2'-O-methylcytidine-3'-phosphate
  modified_base 10: mod_base = OTHER; note = 2'-O-methyluridine-3'-phosphate
  modified_base 11: mod_base = OTHER; note = 2'-O-methylguanosine-3'-phosphate
  modified_base 12: mod_base = OTHER; note = 2'-O-methylguanosine-3'-phosphate
  modified_base 13: mod_base = OTHER; note = 2'-O-methylguanosine-3'-phosphate
  modified_base 14: mod_base = OTHER; note = 2'-deoxy-2'-fluorocytidine-3'-phosphate
  modified_base 15: mod_base = OTHER; note = 2'-O-methylcytidine-3'-phosphate
  modified_base 16: mod_base = OTHER; note = 2'-deoxy-2'-fluoroadenosine-3'-phosphate
  modified_base 17: mod_base = OTHER; note = 2'-O-methylcytidine-3'-phosphate
  modified_base 18: mod_base = OTHER; note = 2'-O-methylcytidine-3'-phosphate
  modified_base 19: mod_base = OTHER; note = 2'-O-methyluridine-3'-phosphate
  modified_base 20: mod_base = OTHER; note = 2'-O-methylguanosine-3'-phosphate
  modified_base 21: mod_base = OTHER; note = 2'-O-methylguanosine-3'-phosphorothioate
  modified_base 22: mod_base = OTHER; note = 2'-O-methylguanosine-3'-phosphorothioate
  modified_base 23: mod_base = OTHER; note = 2'-O-methyladenosine
atggcctgctgggccacctggga

SEQ ID NO: 805 - RNA, 23 nt, synthetic construct
  source 1..23: mol_type = other RNA
  modified_base 1: mod_base = OTHER; note = 2'-O-methyladenosine-3'-phosphorothioate
  modified_base 2: mod_base = OTHER; note = 2'-deoxy-2'-fluoroguanosine-3'-phosphorothioate
  modified_base 3: mod_base = OTHER; note = 2'-O-methylcytidine-3'-phosphate
  modified_base 4: mod_base = OTHER; note = 2'-O-methyluridine-3'-phosphate
  modified_base 5: mod_base = OTHER; note = 2'-O-methylguanosine-3'-phosphate
  modified_base 6: mod_base = OTHER; note = 2'-O-methylcytidine-3'-phosphate
  modified_base 7: mod_base = OTHER; note = Cytidine-glycol nucleic acid (GNA), S-isomer
  modified_base 8: mod_base = OTHER; note = 2'-O-methyluridine-3'-phosphate
  modified_base 9: mod_base = OTHER; note = 2'-O-methylcytidine-3'-phosphate
  modified_base 10: mod_base = OTHER; note = 2'-O-methyluridine-3'-phosphate
  modified_base 11: mod_base = OTHER; note = 2'-O-methyladenosine-3'-phosphate
  modified_base 12: mod_base = OTHER; note = 2'-O-methylguanosine-3'-phosphate
  modified_base 13: mod_base = OTHER; note = 2'-O-methylguanosine-3'-phosphate
  modified_base 14: mod_base = OTHER; note = 2'-deoxy-2'-fluoroguanosine-3'-phosphate
  modified_base 15: mod_base = OTHER; note = 2'-O-methyladenosine-3'-phosphate
  modified_base 16: mod_base = OTHER; note = 2'-deoxy-2'-fluorouridine-3'-phosphate
  modified_base 17: mod_base = OTHER; note = 2'-O-methylguanosine-3'-phosphate
  modified_base 18: mod_base = OTHER; note = 2'-O-methyladenosine-3'-phosphate
  modified_base 19: mod_base = OTHER; note = 2'-O-methyladenosine-3'-phosphate
  modified_base 20: mod_base = OTHER; note = 2'-O-methylcytidine-3'-phosphate
  modified_base 21: mod_base = OTHER; note = 2'-O-methyluridine-3'-phosphorothioate
  modified_base 22: mod_base = OTHER; note = 2'-O-methylguanosine-3'-phosphorothioate
  modified_base 23: mod_base = OTHER; note = 2'-O-methyladenosine
agctgcctctagggatgaactga

SEQ ID NO: 806 - RNA, 23 nt, synthetic construct
  source 1..23: mol_type = other RNA
  modified_base 1: mod_base = OTHER; note = 2'-O-methyladenosine-3'-phosphorothioate
  modified_base 2: mod_base = OTHER; note = 2'-deoxy-2'-fluoroadenosine-3'-phosphorothioate
  modified_base 3: mod_base = OTHER; note = 2'-O-methylguanosine-3'-phosphate
  modified_base 4: mod_base = OTHER; note = 2'-O-methyluridine-3'-phosphate
  modified_base 5: mod_base = OTHER; note = 2'-O-methylguanosine-3'-phosphate
  modified_base 6: mod_base = OTHER; note = 2'-O-methylcytidine-3'-phosphate
  modified_base 7: mod_base = OTHER; note = Adenosine-glycol nucleic acid (GNA), S-isomer
  modified_base 8: mod_base = OTHER; note = 2'-O-methyluridine-3'-phosphate
  modified_base 9: mod_base = OTHER; note = 2'-O-methylcytidine-3'-phosphate
  modified_base 10: mod_base = OTHER; note = 2'-O-methylcytidine-3'-phosphate
  modified_base 11: mod_base = OTHER; note = 2'-O-methyluridine-3'-phosphate
  modified_base 12: mod_base = OTHER; note = 2'-O-methyluridine-3'-phosphate
  modified_base 13: mod_base = OTHER; note = 2'-O-methylguanosine-3'-phosphate
  modified_base 14: mod_base = OTHER; note = 2'-deoxy-2'-fluoroguanosine-3'-phosphate
  modified_base 15: mod_base = OTHER; note = 2'-O-methylcytidine-3'-phosphate
  modified_base 16: mod_base = OTHER; note = 2'-deoxy-2'-fluoroguanosine-3'-phosphate
  modified_base 17: mod_base = OTHER; note = 2'-O-methylguanosine-3'-phosphate
  modified_base 18: mod_base = OTHER; note = 2'-O-methyluridine-3'-phosphate
  modified_base 19: mod_base = OTHER; note = 2'-O-methylcytidine-3'-phosphate
  modified_base 20: mod_base = OTHER; note = 2'-O-methyluridine-3'-phosphate
  modified_base 21: mod_base = OTHER; note = 2'-O-methyluridine-3'-phosphorothioate
  modified_base 22: mod_base = OTHER; note = 2'-O-methylguanosine-3'-phosphorothioate
  modified_base 23: mod_base = OTHER; note = 2'-O-methylguanosine
aagtgcatccttggcggtcttgg

SEQ ID NO: 807 - RNA, 23 nt, synthetic construct
  source 1..23: mol_type = other RNA
  modified_base 1: mod_base = OTHER; note = 2'-O-methyladenosine-3'-phosphorothioate
  modified_base 2: mod_base = OTHER; note = 2'-deoxy-2'-fluorocytidine-3'-phosphorothioate
  modified_base 3: mod_base = OTHER; note = 2'-O-methyluridine-3'-phosphate
  modified_base 4: mod_base = OTHER; note = 2'-O-methylguanosine-3'-phosphate
  modified_base 5: mod_base = OTHER; note = 2'-O-methyluridine-3'-phosphate
  modified_base 6: mod_base = OTHER; note = 2'-O-methyluridine-3'-phosphate
  modified_base 7: mod_base = OTHER; note = Cytidine-glycol nucleic acid (GNA), S-isomer
  modified_base 8: mod_base = OTHER; note = 2'-O-methylcytidine-3'-phosphate
  modified_base 9: mod_base = OTHER; note = 2'-O-methyluridine-3'-phosphate
  modified_base 10: mod_base = OTHER; note = 2'-O-methylguanosine-3'-phosphate
  modified_base 11: mod_base = OTHER; note = 2'-O-methylguanosine-3'-phosphate
  modified_base 12: mod_base = OTHER; note = 2'-O-methyladenosine-3'-phosphate
  modified_base 13: mod_base = OTHER; note = 2'-O-methylguanosine-3'-phosphate
  modified_base 14: mod_base = OTHER; note = 2'-deoxy-2'-fluorocytidine-3'-phosphate
  modified_base 15: mod_base = OTHER; note = 2'-O-methyladenosine-3'-phosphate
  modified_base 16: mod_base = OTHER; note = 2'-deoxy-2'-fluoroguanosine-3'-phosphate
  modified_base 17: mod_base = OTHER; note = 2'-O-methylcytidine-3'-phosphate
  modified_base 18: mod_base = OTHER; note = 2'-O-methyluridine-3'-phosphate
  modified_base 19: mod_base = OTHER; note = 2'-O-methylguanosine-3'-phosphate
  modified_base 20: mod_base = OTHER; note = 2'-O-methylcytidine-3'-phosphate
  modified_base 21: mod_base = OTHER; note = 2'-O-methylcytidine-3'-phosphorothioate
  modified_base 22: mod_base = OTHER; note = 2'-O-methyluridine-3'-phosphorothioate
  modified_base 23: mod_base = OTHER; note = 2'-O-methylcytidine
actgttcctggagcagctgcctc

SEQ ID NO: 808 - RNA, 23 nt, synthetic construct
  source 1..23: mol_type = other RNA
  modified_base 1: mod_base = OTHER; note = 2'-O-methyladenosine-3'-phosphorothioate
  modified_base 2: mod_base = OTHER; note = 2'-deoxy-2'-fluorouridine-3'-phosphorothioate
  modified_base 3: mod_base = OTHER; note = 2'-O-methylcytidine-3'-phosphate
  modified_base 4: mod_base = OTHER; note = 2'-O-methyluridine-3'-phosphate
  modified_base 5: mod_base = OTHER; note = 2'-O-methyluridine-3'-phosphate
  modified_base 6: mod_base = OTHER; note = 2'-O-methyluridine-3'-phosphate
  modified_base 7: mod_base = OTHER; note = Cytidine-glycol nucleic acid (GNA), S-isomer
  modified_base 8: mod_base = OTHER; note = 2'-O-methyladenosine-3'-phosphate
  modified_base 9: mod_base = OTHER; note = 2'-O-methylguanosine-3'-phosphate
  modified_base 10: mod_base = OTHER; note = 2'-O-methylguanosine-3'-phosphate
  modified_base 11: mod_base = OTHER; note = 2'-O-methylguanosine-3'-phosphate
  modified_base 12: mod_base = OTHER; note = 2'-O-methyladenosine-3'-phosphate
  modified_base 13: mod_base = OTHER; note = 2'-O-methyladenosine-3'-phosphate
  modified_base 14: mod_base = OTHER; note = 2'-deoxy-2'-fluorocytidine-3'-phosphate
  modified_base 15: mod_base = OTHER; note = 2'-O-methyluridine-3'-phosphate
  modified_base 16: mod_base = OTHER; note = 2'-deoxy-2'-fluoroguanosine-3'-phosphate
  modified_base 17: mod_base = OTHER; note = 2'-O-methyladenosine-3'-phosphate
  modified_base 18: mod_base = OTHER; note = 2'-O-methyladenosine-3'-phosphate
  modified_base 19: mod_base = OTHER; note = 2'-O-methylguanosine-3'-phosphate
  modified_base 20: mod_base = OTHER; note = 2'-O-methylcytidine-3'-phosphate
  modified_base 21: mod_base = OTHER; note = 2'-O-methylcytidine-3'-phosphorothioate
  modified_base 22: mod_base = OTHER; note = 2'-O-methyladenosine-3'-phosphorothioate
  modified_base 23: mod_base = OTHER; note = 2'-O-methyluridine
atctttcagggaactgaagccat

SEQ ID NO: 809 - RNA, 23 nt, synthetic construct
  source 1..23: mol_type = other RNA
  modified_base 1: mod_base = OTHER; note = 2'-O-methyladenosine-3'-phosphorothioate
  modified_base 2: mod_base = OTHER; note = 2'-deoxy-2'-fluorocytidine-3'-phosphorothioate
  modified_base 3: mod_base = OTHER; note = 2'-O-methylcytidine-3'-phosphate
  modified_base 4: mod_base = OTHER; note = 2'-O-methyluridine-3'-phosphate
  modified_base 5: mod_base = OTHER; note = 2'-O-methylcytidine-3'-phosphate
  modified_base 6: mod_base = OTHER; note = 2'-O-methyluridine-3'-phosphate
  modified_base 7: mod_base = OTHER; note = Guanosine-glycol nucleic acid (GNA), S-isomer
  modified_base 8: mod_base = OTHER; note = 2'-O-methyluridine-3'-phosphate
  modified_base 9: mod_base = OTHER; note = 2'-O-methyluridine-3'-phosphate
  modified_base 10: mod_base = OTHER; note = 2'-O-methylcytidine-3'-phosphate
  modified_base 11: mod_base = OTHER; note = 2'-O-methylcytidine-3'-phosphate
  modified_base 12: mod_base = OTHER; note = 2'-O-methyluridine-3'-phosphate
  modified_base 13: mod_base = OTHER; note = 2'-O-methylguanosine-3'-phosphate
  modified_base 14: mod_base = OTHER; note = 2'-deoxy-2'-fluoroguanosine-3'-phosphate
  modified_base 15: mod_base = OTHER; note = 2'-O-methyladenosine-3'-phosphate
  modified_base 16: mod_base = OTHER; note = 2'-deoxy-2'-fluoroguanosine-3'-phosphate
  modified_base 17: mod_base = OTHER; note = 2'-O-methylcytidine-3'-phosphate
  modified_base 18: mod_base = OTHER; note = 2'-O-methyladenosine-3'-phosphate
  modified_base 19: mod_base = OTHER; note = 2'-O-methylguanosine-3'-phosphate
  modified_base 20: mod_base = OTHER; note = 2'-O-methylcytidine-3'-phosphate
  modified_base 21: mod_base = OTHER; note = 2'-O-methyluridine-3'-phosphorothioate
  modified_base 22: mod_base = OTHER; note = 2'-O-methylguanosine-3'-phosphorothioate
  modified_base 23: mod_base = OTHER; note = 2'-O-methylcytidine
acctctgttcctggagcagctgc

SEQ ID NO: 810 - RNA, 23 nt, synthetic construct
  source 1..23: mol_type = other RNA
  modified_base 1: mod_base = OTHER; note = 2'-O-methyladenosine-3'-phosphorothioate
  modified_base 2: mod_base = OTHER; note = 2'-deoxy-2'-fluorocytidine-3'-phosphorothioate
  modified_base 3: mod_base = OTHER; note = 2'-O-methyluridine-3'-phosphate
  modified_base 4: mod_base = OTHER; note = 2'-O-methyluridine-3'-phosphate
  modified_base 5: mod_base = OTHER; note = 2'-O-methylguanosine-3'-phosphate
  modified_base 6: mod_base = OTHER; note = 2'-O-methylguanosine-3'-phosphate
  modified_base 7: mod_base = OTHER; note = Cytidine-glycol nucleic acid (GNA), S-isomer
  modified_base 8: mod_base = OTHER; note = 2'-O-methylguanosine-3'-phosphate
  modified_base 9: mod_base = OTHER; note = 2'-O-methylguanosine-3'-phosphate
  modified_base 10: mod_base = OTHER; note = 2'-O-methyluridine-3'-phosphate
  modified_base 11: mod_base = OTHER; note = 2'-O-methylcytidine-3'-phosphate
  modified_base 12: mod_base = OTHER; note = 2'-O-methyluridine-3'-phosphate
  modified_base 13: mod_base = OTHER; note = 2'-O-methyluridine-3'-phosphate
  modified_base 14: mod_base = OTHER; note = 2'-deoxy-2'-fluoroguanosine-3'-phosphate
  modified_base 15: mod_base = OTHER; note = 2'-O-methylguanosine-3'-phosphate
  modified_base 16: mod_base = OTHER; note = 2'-deoxy-2'-fluorouridine-3'-phosphate
  modified_base 17: mod_base = OTHER; note = 2'-O-methylguanosine-3'-phosphate
  modified_base 18: mod_base = OTHER; note = 2'-O-methylguanosine-3'-phosphate
  modified_base 19: mod_base = OTHER; note = 2'-O-methylcytidine-3'-phosphate
  modified_base 20: mod_base = OTHER; note = 2'-O-methylguanosine-3'-phosphate
  modified_base 21: mod_base = OTHER; note = 2'-O-methyluridine-3'-phosphorothioate
  modified_base 22: mod_base = OTHER; note = 2'-O-methylguanosine-3'-phosphorothioate
  modified_base 23: mod_base = OTHER; note = 2'-O-methylcytidine
acttggcggtcttggtggcgtgc

SEQ ID NO: 811 - RNA, 21 nt, synthetic construct
  source 1..21: mol_type = other RNA
  modified_base 1: mod_base = OTHER; note = 2'-O-methyluridine-3'-phosphorothioate
  modified_base 2: mod_base = OTHER; note = 2'-O-methyluridine-3'-phosphorothioate
  modified_base 3: mod_base = OTHER; note = 2'-O-methylguanosine-3'-phosphate
  modified_base 4: mod_base = OTHER; note = 2'-O-methylcytidine-3'-phosphate
  modified_base 5: mod_base = OTHER; note = 2'-O-methyluridine-3'-phosphate
  modified_base 6: mod_base = OTHER; note = 2'-O-methyluridine-3'-phosphate
  modified_base 7: mod_base = OTHER; note = 2'-deoxy-2'-fluoroadenosine-3'-phosphate
  modified_base 8: mod_base = OTHER; note = 2'-O-methyladenosine-3'-phosphate
  modified_base 9: mod_base = OTHER; note = 2'-deoxy-2'-fluoroadenosine-3'-phosphate
  modified_base 10: mod_base = OTHER; note = 2'-deoxy-2'-fluoroadenosine-3'-phosphate
  modified_base 11: mod_base = OTHER; note = 2'-deoxy-2'-fluoroguanosine-3'-phosphate
  modified_base 12: mod_base = OTHER; note = 2'-O-methylguanosine-3'-phosphate
  modified_base 13: mod_base = OTHER; note = 2'-O-methylguanosine-3'-phosphate
  modified_base 14: mod_base = OTHER; note = 2'-O-methyladenosine-3'-phosphate
  modified_base 15: mod_base = OTHER; note = 2'-O-methylcytidine-3'-phosphate
  modified_base 16: mod_base = OTHER; note = 2'-O-methyladenosine-3'-phosphate
  modified_base 17: mod_base = OTHER; note = 2'-O-methylguanosine-3'-phosphate
  modified_base 18: mod_base = OTHER; note = 2'-O-methyluridine-3'-phosphate
  modified_base 19: mod_base = OTHER; note = 2'-O-methyladenosine-3'-phosphate
  modified_base 20: mod_base = OTHER; note = 2'-O-methyluridine-3'-phosphate
  modified_base 21: mod_base = OTHER; note = 2'-O-methyluridine-3'-phosphate ((2S,4R)-1-[29-[[2-(acetylamino)-2-deoxy-beta-D-galactopyra nosyl]oxy]-14,14-bis[[3-[[3-[[5-[[2-(acetylamino)-2-deoxy-b eta-D-galactopyranosyl]oxy]-1-oxopentyl]amino]propyl]amino] -3-oxopropoxy]methyl]-1,12,19,25-tetraoxo-16-oxa-13,20,24-t riazanonacos-1-yl]-4-hydroxy-2-pyrrolidinyl)methyl ester
ttgcttaaaagggacagtatt

SEQ ID NO: 812 - RNA, 23 nt, synthetic construct
  source 1..23: mol_type = other RNA
  modified_base 1: mod_base = OTHER; note = 2'-O-methyladenosine-3'-phosphorothioate
  modified_base 2: mod_base = OTHER; note = 2'-deoxy-2'-fluoroadenosine-3'-phosphorothioate
  modified_base 3: mod_base = OTHER; note = 2'-O-methylguanosine-3'-phosphate
  modified_base 4: mod_base = OTHER; note = 2'-O-methylcytidine-3'-phosphate
  modified_base 5: mod_base = OTHER; note = 2'-O-methylcytidine-3'-phosphate
  modified_base 6: mod_base = OTHER; note = 2'-O-methyladenosine-3'-phosphate
  modified_base 7: mod_base = OTHER; note = Thymidine-glycol nucleic acid (GNA), S-Isomer
  modified_base 8: mod_base = OTHER; note = 2'-O-methylcytidine-3'-phosphate
  modified_base 9: mod_base = OTHER; note = 2'-O-methylguanosine-3'-phosphate
  modified_base 10: mod_base = OTHER; note = 2'-O-methylguanosine-3'-phosphate
  modified_base 11: mod_base = OTHER; note = 2'-O-methyluridine-3'-phosphate
  modified_base 12: mod_base = OTHER; note = 2'-O-methylcytidine-3'-phosphate
  modified_base 13: mod_base = OTHER; note = 2'-O-methyladenosine-3'-phosphate
  modified_base 14: mod_base = OTHER; note = 2'-deoxy-2'-fluorocytidine-3'-phosphate
  modified_base 15: mod_base = OTHER; note = 2'-O-methylcytidine-3'-phosphate
  modified_base 16: mod_base = OTHER; note = 2'-deoxy-2'-fluorocytidine-3'-phosphate
  modified_base 17: mod_base = OTHER; note = 2'-O-methyladenosine-3'-phosphate
  modified_base 18: mod_base = OTHER; note = 2'-O-methylguanosine-3'-phosphate
  modified_base 19: mod_base = OTHER; note = 2'-O-methylcytidine-3'-phosphate
  modified_base 20: mod_base = OTHER; note = 2'-O-methylcytidine-3'-phosphate
  modified_base 21: mod_base = OTHER; note = 2'-O-methylcytidine-3'-phosphorothioate
  modified_base 22: mod_base = OTHER; note = 2'-O-methylcytidine-3'-phosphorothioate
  modified_base 23: mod_base = OTHER; note = 2'-O-methyluridine
aagccatcggtcacccagcccct

SEQ ID NO: 813 - RNA, 23 nt, synthetic construct
  source 1..23: mol_type = other RNA
  modified_base 1: mod_base = OTHER; note = 2'-O-methyladenosine-3'-phosphorothioate
  modified_base 2: mod_base = OTHER; note = 2'-deoxy-2'-fluorouridine-3'-phosphorothioate
  modified_base 3: mod_base = OTHER; note = 2'-O-methylcytidine-3'-phosphate
  modified_base 4: mod_base = OTHER; note = 2'-O-methylcytidine-3'-phosphate
  modified_base 5: mod_base = OTHER; note = 2'-O-methyluridine-3'-phosphate
  modified_base 6: mod_base = OTHER; note = 2'-O-methylcytidine-3'-phosphate
  modified_base 7: mod_base = OTHER; note = Guanosine-glycol nucleic acid (GNA), S-isomer
  modified_base 8: mod_base = OTHER; note = 2'-O-methylguanosine-3'-phosphate
  modified_base 9: mod_base = OTHER; note = 2'-O-methylcytidine-3'-phosphate
  modified_base 10: mod_base = OTHER; note = 2'-O-methylcytidine-3'-phosphate
  modified_base 11: mod_base = OTHER; note = 2'-O-methyluridine-3'-phosphate
  modified_base 12: mod_base = OTHER; note = 2'-O-methylcytidine-3'-phosphate
  modified_base 13: mod_base = OTHER; note = 2'-O-methyluridine-3'-phosphate
  modified_base 14: mod_base = OTHER; note = 2'-deoxy-2'-fluoroguanosine-3'-phosphate
  modified_base 15: mod_base = OTHER; note = 2'-O-methyladenosine-3'-phosphate
  modified_base 16: mod_base = OTHER; note = 2'-deoxy-2'-fluoroadenosine-3'-phosphate
  modified_base 17: mod_base = OTHER; note = 2'-O-methylguanosine-3'-phosphate
  modified_base 18: mod_base = OTHER; note = 2'-O-methylcytidine-3'-phosphate
  modified_base 19: mod_base = OTHER; note = 2'-O-methyluridine-3'-phosphate
  modified_base 20: mod_base = OTHER; note = 2'-O-methylcytidine-3'-phosphate
  modified_base 21: mod_base = OTHER; note = 2'-O-methylguanosine-3'-phosphorothioate
  modified_base 22: mod_base = OTHER; note = 2'-O-methylguanosine-3'-phosphorothioate
  modified_base 23: mod_base = OTHER; note = 2'-O-methylguanosine
atcctcggcctctgaagctcggg

SEQ ID NO: 814 - RNA, 23 nt, synthetic construct
  source 1..23: mol_type = other RNA
  modified_base 1: mod_base = OTHER; note = 2'-O-methyladenosine-3'-phosphorothioate
  modified_base 2: mod_base = OTHER; note = 2'-deoxy-2'-fluoroguanosine-3'-phosphorothioate
  modified_base 3: mod_base = OTHER; note = 2'-O-methylcytidine-3'-phosphate
  modified_base 4: mod_base = OTHER; note = 2'-O-methyluridine-3'-phosphate
  modified_base 5: mod_base = OTHER; note = 2'-O-methylguanosine-3'-phosphate
  modified_base 6: mod_base = OTHER; note = 2'-O-methylguanosine-3'-phosphate
  modified_base 7: mod_base = OTHER; note = Guanosine-glycol nucleic acid (GNA), S-isomer
  modified_base 8: mod_base = OTHER; note = 2'-O-methylcytidine-3'-phosphate
  modified_base 9: mod_base = OTHER; note = 2'-O-methylcytidine-3'-phosphate
  modified_base 10: mod_base = OTHER; note = 2'-O-methyladenosine-3'-phosphate
  modified_base 11: mod_base = OTHER; note = 2'-O-methylcytidine-3'-phosphate
  modified_base 12: mod_base = OTHER; note = 2'-O-methylcytidine-3'-phosphate
  modified_base 13: mod_base = OTHER; note = 2'-O-methyluridine-3'-phosphate
  modified_base 14: mod_base = OTHER; note = 2'-deoxy-2'-fluoroguanosine-3'-phosphate
  modified_base 15: mod_base = OTHER; note = 2'-O-methylguanosine-3'-phosphate
  modified_base 16: mod_base = OTHER; note = 2'-deoxy-2'-fluoroguanosine-3'-phosphate
  modified_base 17: mod_base = OTHER; note = 2'-O-methyladenosine-3'-phosphate
  modified_base 18: mod_base = OTHER; note = 2'-O-methylcytidine-3'-phosphate
  modified_base 19: mod_base = OTHER; note = 2'-O-methyluridine-3'-phosphate
  modified_base 20: mod_base = OTHER; note = 2'-O-methylcytidine-3'-phosphate
  modified_base 21: mod_base = OTHER; note = 2'-O-methylcytidine-3'-phosphorothioate
  modified_base 22: mod_base = OTHER; note = 2'-O-methyluridine-3'-phosphorothioate
  modified_base 23: mod_base = OTHER; note = 2'-O-methylguanosine
agctgggccacctgggactcctg

SEQ ID NO: 815 - RNA, 23 nt, synthetic construct
  source 1..23: mol_type = other RNA
  modified_base 1: mod_base = OTHER; note = 2'-O-methyladenosine-3'-phosphorothioate
  modified_base 2: mod_base = OTHER; note = 2'-deoxy-2'-fluorouridine-3'-phosphorothioate
  modified_base 3: mod_base = OTHER; note = 2'-O-methylguanosine-3'-phosphate
  modified_base 4: mod_base = OTHER; note = 2'-O-methyluridine-3'-phosphate
  modified_base 5: mod_base = OTHER; note = 2'-O-methylcytidine-3'-phosphate
  modified_base 6: mod_base = OTHER; note = 2'-O-methylcytidine-3'-phosphate
  modified_base 7: mod_base = OTHER; note = Cytidine-glycol nucleic acid (GNA), S-isomer
  modified_base 8: mod_base = OTHER; note = 2'-O-methyluridine-3'-phosphate
  modified_base 9: mod_base = OTHER; note = 2'-O-methyluridine-3'-phosphate
  modified_base 10: mod_base = OTHER; note = 2'-O-methyluridine-3'-phosphate
  modified_base 11: mod_base = OTHER; note = 2'-O-methyluridine-3'-phosphate
  modified_base 12: mod_base = OTHER; note = 2'-O-methyladenosine-3'-phosphate
  modified_base 13: mod_base = OTHER; note = 2'-O-methyladenosine-3'-phosphate
  modified_base 14: mod_base = OTHER; note = 2'-deoxy-2'-fluoroguanosine-3'-phosphate
  modified_base 15: mod_base = OTHER; note = 2'-O-methylcytidine-3'-phosphate
  modified_base 16: mod_base = OTHER; note = 2'-deoxy-2'-fluoroadenosine-3'-phosphate
  modified_base 17: mod_base = OTHER; note = 2'-O-methyladenosine-3'-phosphate
  modified_base 18: mod_base = OTHER; note = 2'-O-methylcytidine-3'-phosphate
  modified_base 19: mod_base = OTHER; note = 2'-O-methylcytidine-3'-phosphate
  modified_base 20: mod_base = OTHER; note = 2'-O-methyluridine-3'-phosphate
  modified_base 21: mod_base = OTHER; note = 2'-O-methyladenosine-3'-phosphorothioate
  modified_base 22: mod_base = OTHER; note = 2'-O-methylcytidine-3'-phosphorothioate
  modified_base 23: mod_base = OTHER; note = 2'-O-methyladenosine
atgtcccttttaagcaacctaca

SEQ ID NO: 816 - RNA, 23 nt, synthetic construct
  source 1..23: mol_type = other RNA
  modified_base 1: mod_base = OTHER; note = 2'-O-methyladenosine-3'-phosphorothioate
  modified_base 2: mod_base = OTHER; note = 2'-deoxy-2'-fluoroguanosine-3'-phosphorothioate
  modified_base 3: mod_base = OTHER; note = 2'-O-methylguanosine-3'-phosphate
  modified_base 4: mod_base = OTHER; note = 2'-O-methylcytidine-3'-phosphate
  modified_base 5: mod_base = OTHER; note = 2'-O-methylcytidine-3'-phosphate
  modified_base 6: mod_base = OTHER; note = 2'-O-methyladenosine-3'-phosphate
  modified_base 7: mod_base = OTHER; note = Cytidine-glycol nucleic acid (GNA), S-isomer
  modified_base 8: mod_base = OTHER; note = 2'-O-methylcytidine-3'-phosphate
  modified_base 9: mod_base = OTHER; note = 2'-O-methyluridine-3'-phosphate
  modified_base 10: mod_base = OTHER; note = 2'-O-methylguanosine-3'-phosphate
  modified_base 11: mod_base = OTHER; note = 2'-O-methylguanosine-3'-phosphate
  modified_base 12: mod_base = OTHER; note = 2'-O-methylguanosine-3'-phosphate
  modified_base 13: mod_base = OTHER; note = 2'-O-methyladenosine-3'-phosphate
  modified_base 14: mod_base = OTHER; note = 2'-deoxy-2'-fluorocytidine-3'-phosphate
  modified_base 15: mod_base = OTHER; note = 2'-O-methyluridine-3'-phosphate
  modified_base 16: mod_base = OTHER; note = 2'-deoxy-2'-fluorocytidine-3'-phosphate
  modified_base 17: mod_base = OTHER; note = 2'-O-methylcytidine-3'-phosphate
  modified_base 18: mod_base = OTHER; note = 2'-O-methyluridine-3'-phosphate
  modified_base 19: mod_base = OTHER; note = 2'-O-methylguanosine-3'-phosphate
  modified_base 20: mod_base = OTHER; note = 2'-O-methylcytidine-3'-phosphate
  modified_base 21: mod_base = OTHER; note = 2'-O-methyladenosine-3'-phosphorothioate
  modified_base 22: mod_base = OTHER; note = 2'-O-methylcytidine-3'-phosphorothioate
  modified_base 23: mod_base = OTHER; note = 2'-O-methylguanosine
aggccacctgggactcctgcacg

SEQ ID NO: 817 - RNA, 23 nt, synthetic construct
  source 1..23: mol_type = other RNA
  modified_base 1: mod_base = OTHER; note = 2'-O-methyladenosine-3'-phosphorothioate
  modified_base 2: mod_base = OTHER; note = 2'-deoxy-2'-fluoroguanosine-3'-phosphorothioate
  modified_base 3: mod_base = OTHER; note = 2'-O-methylcytidine-3'-phosphate
  modified_base 4: mod_base = OTHER; note = 2'-O-methyladenosine-3'-phosphate
  modified_base 5: mod_base = OTHER; note = 2'-O-methyluridine-3'-phosphate
  modified_base 6: mod_base = OTHER; note = 2'-O-methylcytidine-3'-phosphate
  modified_base 7: mod_base = OTHER; note = Cytidine-glycol nucleic acid (GNA), S-isomer
  modified_base 8: mod_base = OTHER; note = 2'-O-methyluridine-3'-phosphate
  modified_base 9: mod_base = OTHER; note = 2'-O-methyluridine-3'-phosphate
  modified_base 10: mod_base = OTHER; note = 2'-O-methylguanosine-3'-phosphate
  modified_base 11: mod_base = OTHER; note = 2'-O-methylguanosine-3'-phosphate
  modified_base 12: mod_base = OTHER; note = 2'-O-methylcytidine-3'-phosphate
  modified_base 13: mod_base = OTHER; note = 2'-O-methylguanosine-3'-phosphate
  modified_base 14: mod_base = OTHER; note = 2'-deoxy-2'-fluoroguanosine-3'-phosphate
  modified_base 15: mod_base = OTHER; note = 2'-O-methyluridine-3'-phosphate
  modified_base 16: mod_base = OTHER; note = 2'-deoxy-2'-fluorocytidine-3'-phosphate
  modified_base 17: mod_base = OTHER; note = 2'-O-methyluridine-3'-phosphate
  modified_base 18: mod_base = OTHER; note = 2'-O-methyluridine-3'-phosphate
  modified_base 19: mod_base = OTHER; note = 2'-O-methylguanosine-3'-phosphate
  modified_base 20: mod_base = OTHER; note = 2'-O-methylguanosine-3'-phosphate
  modified_base 21: mod_base = OTHER; note = 2'-O-methyluridine-3'-phosphorothioate
  modified_base 22: mod_base = OTHER; note = 2'-O-methylguanosine-3'-phosphorothioate
  modified_base 23: mod_base = OTHER; note = 2'-O-methylguanosine
agcatccttggcggtcttggtgg

SEQ ID NO: 818 - RNA, 23 nt, synthetic construct
  source 1..23: mol_type = other RNA
  modified_base 1: mod_base = OTHER; note = 2'-O-methyladenosine-3'-phosphorothioate
  modified_base 2: mod_base = OTHER; note = 2'-deoxy-2'-fluorocytidine-3'-phosphorothioate
  modified_base 3: mod_base = OTHER; note = 2'-O-methyluridine-3'-phosphate
  modified_base 4: mod_base = OTHER; note = 2'-O-methyluridine-3'-phosphate
  modified_base 5: mod_base = OTHER; note = 2'-O-methyladenosine-3'-phosphate
  modified_base 6: mod_base = OTHER; note = 2'-O-methyladenosine-3'-phosphate
  modified_base 7: mod_base = OTHER; note = Cytidine-glycol nucleic acid (GNA), S-isomer
  modified_base 8: mod_base = OTHER; note = 2'-O-methylguanosine-3'-phosphate
  modified_base 9: mod_base = OTHER; note = 2'-O-methylguanosine-3'-phosphate
  modified_base 10: mod_base = OTHER; note = 2'-O-methyluridine-3'-phosphate
  modified_base 11: mod_base = OTHER; note = 2'-O-methylguanosine-3'-phosphate
  modified_base 12: mod_base = OTHER; note = 2'-O-methylcytidine-3'-phosphate
  modified_base 13: mod_base = OTHER; note = 2'-O-methyluridine-3'-phosphate
  modified_base 14: mod_base = OTHER; note = 2'-deoxy-2'-fluorocytidine-3'-phosphate
  modified_base 15: mod_base = OTHER; note = 2'-O-methylcytidine-3'-phosphate
  modified_base 16: mod_base = OTHER; note = 2'-deoxy-2'-fluoroadenosine-3'-phosphate
  modified_base 17: mod_base = OTHER; note = 2'-O-methylguanosine-3'-phosphate
  modified_base 18: mod_base = OTHER; note = 2'-O-methyluridine-3'-phosphate
  modified_base 19: mod_base = OTHER; note = 2'-O-methyladenosine-3'-phosphate
  modified_base 20: mod_base = OTHER; note = 2'-O-methylguanosine-3'-phosphate
  modified_base 21: mod_base = OTHER; note = 2'-O-methyluridine-3'-phosphorothioate
  modified_base 22: mod_base = OTHER; note = 2'-O-methylcytidine-3'-phosphorothioate
  modified_base 23: mod_base = OTHER; note = 2'-O-methyluridine
acttaacggtgctccagtagtct

SEQ ID NO: 819 - RNA, 23 nt, synthetic construct
  source 1..23: mol_type = other RNA
  modified_base 1: mod_base = OTHER; note = 2'-O-methyladenosine-3'-phosphorothioate
  modified_base 2: mod_base = OTHER; note = 2'-deoxy-2'-fluorouridine-3'-phosphorothioate
  modified_base 3: mod_base = OTHER; note = 2'-O-methylcytidine-3'-phosphate
  modified_base 4: mod_base = OTHER; note = 2'-O-methylcytidine-3'-phosphate
  modified_base 5: mod_base = OTHER; note = 2'-O-methyluridine-3'-phosphate
  modified_base 6: mod_base = OTHER; note = 2'-O-methyluridine-3'-phosphate
  modified_base 7: mod_base = OTHER; note = Adenosine-glycol nucleic acid (GNA), S-isomer
  modified_base 8: mod_base = OTHER; note = 2'-O-methyladenosine-3'-phosphate
  modified_base 9: mod_base = OTHER; note = 2'-O-methylcytidine-3'-phosphate
  modified_base 10: mod_base = OTHER; note = 2'-O-methylguanosine-3'-phosphate
  modified_base 11: mod_base = OTHER; note = 2'-O-methylguanosine-3'-phosphate
  modified_base 12: mod_base = OTHER; note = 2'-O-methyluridine-3'-phosphate
  modified_base 13: mod_base = OTHER; note = 2'-O-methylguanosine-3'-phosphate
  modified_base 14: mod_base = OTHER; note = 2'-deoxy-2'-fluorocytidine-3'-phosphate
  modified_base 15: mod_base = OTHER; note = 2'-O-methyluridine-3'-phosphate
  modified_base 16: mod_base = OTHER; note = 2'-deoxy-2'-fluorocytidine-3'-phosphate
  modified_base 17: mod_base = OTHER; note = 2'-O-methylcytidine-3'-phosphate
  modified_base 18: mod_base = OTHER; note = 2'-O-methyladenosine-3'-phosphate
  modified_base 19: mod_base = OTHER; note = 2'-O-methylguanosine-3'-phosphate
  modified_base 20: mod_base = OTHER; note = 2'-O-methyluridine-3'-phosphate
  modified_base 21: mod_base = OTHER; note = 2'-O-methyladenosine-3'-phosphorothioate
  modified_base 22: mod_base = OTHER; note = 2'-O-methylguanosine-3'-phosphorothioate
  modified_base 23: mod_base = OTHER; note = 2'-O-methyluridine
atccttaacggtgctccagtagt

SEQ ID NO: 820 - RNA, 23 nt, synthetic construct
  source 1..23: mol_type = other RNA
  modified_base 1: mod_base = OTHER; note = 2'-O-methyladenosine-3'-phosphorothioate
  modified_base 2: mod_base = OTHER; note = 2'-deoxy-2'-fluorouridine-3'-phosphorothioate
  modified_base 3: mod_base = OTHER; note = 2'-O-methyluridine-3'-phosphate
  modified_base 4: mod_base = OTHER; note = 2'-O-methyladenosine-3'-phosphate
  modified_base 5: mod_base = OTHER; note = 2'-O-methyladenosine-3'-phosphate
  modified_base 6: mod_base = OTHER; note = 2'-O-methylcytidine-3'-phosphate
  modified_base 7: mod_base = OTHER; note = Guanosine-glycol nucleic acid (GNA), S-isomer
  modified_base 8: mod_base = OTHER; note = 2'-O-methylguanosine-3'-phosphate
  modified_base 9: mod_base = OTHER; note = 2'-O-methyluridine-3'-phosphate
  modified_base 10: mod_base = OTHER; note = 2'-O-methylguanosine-3'-phosphate
  modified_base 11: mod_base = OTHER; note = 2'-O-methylcytidine-3'-phosphate
  modified_base 12: mod_base = OTHER; note = 2'-O-methyluridine-3'-phosphate
  modified_base 13: mod_base = OTHER; note = 2'-O-methylcytidine-3'-phosphate
  modified_base 14: mod_base = OTHER; note = 2'-deoxy-2'-fluorocytidine-3'-phosphate
  modified_base 15: mod_base = OTHER; note = 2'-O-methyladenosine-3'-phosphate
  modified_base 16: mod_base = OTHER; note = 2'-deoxy-2'-fluoroguanosine-3'-phosphate
  modified_base 17: mod_base = OTHER; note = 2'-O-methyluridine-3'-phosphate
  modified_base 18: mod_base = OTHER; note = 2'-O-methyladenosine-3'-phosphate
  modified_base 19: mod_base = OTHER; note = 2'-O-methylguanosine-3'-phosphate
  modified_base 20: mod_base = OTHER; note = 2'-O-methyluridine-3'-phosphate
  modified_base 21: mod_base = OTHER; note = 2'-O-methylcytidine-3'-phosphorothioate
  modified_base 22: mod_base = OTHER; note = 2'-O-methyluridine-3'-phosphorothioate
  modified_base 23: mod_base = OTHER; note = 2'-O-methyluridine
attaacggtgctccagtagtctt

SEQ ID NO: 821 - RNA, 23 nt, synthetic construct
  source 1..23: mol_type = other RNA
  modified_base 1: mod_base = OTHER; note = 2'-O-methyladenosine-3'-phosphorothioate
  modified_base 2: mod_base = OTHER; note = 2'-deoxy-2'-fluoroadenosine-3'-phosphorothioate
  modified_base 3: mod_base = OTHER; note = 2'-O-methylguanosine-3'-phosphate
  modified_base 4: mod_base = OTHER; note = 2'-O-methyladenosine-3'-phosphate
  modified_base 5: mod_base = OTHER; note = 2'-O-methyladenosine-3'-phosphate
  modified_base 6: mod_base = OTHER; note = 2'-O-methyluridine-3'-phosphate
  modified_base 7: mod_base = OTHER; note = Adenosine-glycol nucleic acid (GNA), S-isomer
  modified_base 8: mod_base = OTHER; note = 2'-O-methylcytidine-3'-phosphate
  modified_base 9: mod_base = OTHER; note = 2'-O-methyluridine-3'-phosphate
  modified_base 10: mod_base = OTHER; note = 2'-O-methylguanosine-3'-phosphate
  modified_base 11: mod_base = OTHER; note = 2'-O-methyluridine-3'-phosphate
  modified_base 12: mod_base = OTHER; note = 2'-O-methylcytidine-3'-phosphate
  modified_base 13: mod_base = OTHER; note = 2'-O-methylcytidine-3'-phosphate
  modified_base 14: mod_base = OTHER; note = 2'-deoxy-2'-fluorocytidine-3'-phosphate
  modified_base 15: mod_base = OTHER; note = 2'-O-methyluridine-3'-phosphate
  modified_base 16: mod_base = OTHER; note = 2'-deoxy-2'-fluorouridine-3'-phosphate
  modified_base 17: mod_base = OTHER; note = 2'-O-methyluridine-3'-phosphate
  modified_base 18: mod_base = OTHER; note = 2'-O-methyluridine-3'-phosphate
  modified_base 19: mod_base = OTHER; note = 2'-O-methyladenosine-3'-phosphate
  modified_base 20: mod_base = OTHER; note = 2'-O-methyladenosine-3'-phosphate
  modified_base 21: mod_base = OTHER; note = 2'-O-methylguanosine-3'-phosphorothioate
  modified_base 22: mod_base = OTHER; note = 2'-O-methylcytidine-3'-phosphorothioate
  modified_base 23: mod_base = OTHER; note = 2'-O-methyladenosine
aagaatactgtcccttttaagca

SEQ ID NO: 822 - RNA, 23 nt, synthetic construct
  source 1..23: mol_type = other RNA
  modified_base 1: mod_base = OTHER; note = 2'-O-methyladenosine-3'-phosphorothioate
  modified_base 2: mod_base = OTHER; note = 2'-deoxy-2'-fluorouridine-3'-phosphorothioate
  modified_base 3: mod_base = OTHER; note = 2'-O-methylguanosine-3'-phosphate
  modified_base 4: mod_base = OTHER; note = 2'-O-methylcytidine-3'-phosphate
  modified_base 5: mod_base = OTHER; note = 2'-O-methyladenosine-3'-phosphate
  modified_base 6: mod_base = OTHER; note = 2'-O-methyluridine-3'-phosphate
  modified_base 7: mod_base = OTHER; note = Cytidine-glycol nucleic acid (GNA), S-isomer
  modified_base 8: mod_base = OTHER; note = 2'-O-methylcytidine-3'-phosphate
  modified_base 9: mod_base = OTHER; note = 2'-O-methyluridine-3'-phosphate
  modified_base 10: mod_base = OTHER; note = 2'-O-methyluridine-3'-phosphate
  modified_base 11: mod_base = OTHER; note = 2'-O-methylguanosine-3'-phosphate
  modified_base 12: mod_base = OTHER; note = 2'-O-methylguanosine-3'-phosphate
  modified_base 13: mod_base = OTHER; note = 2'-O-methylcytidine-3'-phosphate
  modified_base 14: mod_base = OTHER; note = 2'-deoxy-2'-fluoroguanosine-3'-phosphate
  modified_base 15: mod_base = OTHER; note = 2'-O-methylguanosine-3'-phosphate
  modified_base 16: mod_base = OTHER; note = 2'-deoxy-2'-fluorouridine-3'-phosphate
  modified_base 17: mod_base = OTHER; note = 2'-O-methylcytidine-3'-phosphate
  modified_base 18: mod_base = OTHER; note = 2'-O-methyluridine-3'-phosphate
  modified_base 19: mod_base = OTHER; note = 2'-O-methyluridine-3'-phosphate
  modified_base 20: mod_base = OTHER; note = 2'-O-methylguanosine-3'-phosphate
  modified_base 21: mod_base = OTHER; note = 2'-O-methylguanosine-3'-phosphorothioate
  modified_base 22: mod_base = OTHER; note = 2'-O-methyluridine-3'-phosphorothioate
  modified_base 23: mod_base = OTHER; note = 2'-O-methylguanosine
atgcatccttggcggtcttggtg

SEQ ID NO: 823 - RNA, 23 nt, synthetic construct
  source 1..23: mol_type = other RNA
  modified_base 1: mod_base = OTHER; note = 2'-O-methyladenosine-3'-phosphorothioate
  modified_base 2: mod_base = OTHER; note = 2'-deoxy-2'-fluoroguanosine-3'-phosphorothioate
  modified_base 3: mod_base = OTHER; note = 2'-O-methylguanosine-3'-phosphate
  modified_base 4: mod_base = OTHER; note = 2'-O-methylguanosine-3'-phosphate
  modified_base 5: mod_base = OTHER; note = 2'-O-methylcytidine-3'-phosphate
  modified_base 6: mod_base = OTHER; note = 2'-O-methylcytidine-3'-phosphate
  modified_base 7: mod_base = OTHER; note = Adenosine-glycol nucleic acid (GNA), S-isomer
  modified_base 8: mod_base = OTHER; note = 2'-O-methylcytidine-3'-phosphate
  modified_base 9: mod_base = OTHER; note = 2'-O-methylcytidine-3'-phosphate
  modified_base 10: mod_base = OTHER; note = 2'-O-methyluridine-3'-phosphate
  modified_base 11: mod_base = OTHER; note = 2'-O-methylguanosine-3'-phosphate
  modified_base 12: mod_base = OTHER; note = 2'-O-methylguanosine-3'-phosphate
  modified_base 13: mod_base = OTHER; note = 2'-O-methylguanosine-3'-phosphate
  modified_base 14: mod_base = OTHER; note = 2'-deoxy-2'-fluoroadenosine-3'-phosphate
  modified_base 15: mod_base = OTHER; note = 2'-O-methylcytidine-3'-phosphate
  modified_base 16: mod_base = OTHER; note = 2'-deoxy-2'-fluorouridine-3'-phosphate
  modified_base 17: mod_base = OTHER; note = 2'-O-methylcytidine-3'-phosphate
  modified_base 18: mod_base = OTHER; note = 2'-O-methylcytidine-3'-phosphate
  modified_base 19: mod_base = OTHER; note = 2'-O-methyluridine-3'-phosphate
  modified_base 20: mod_base = OTHER; note = 2'-O-methylguanosine-3'-phosphate
  modified_base 21: mod_base = OTHER; note = 2'-O-methylcytidine-3'-phosphorothioate
  modified_base 22: mod_base = OTHER; note = 2'-O-methyladenosine-3'-phosphorothioate
  modified_base 23: mod_base = OTHER; note = 2'-O-methylcytidine
agggccacctgggactcctgcac

SEQ ID NO: 824 - RNA, 23 nt, synthetic construct
  source 1..23: mol_type = other RNA
  modified_base 1: mod_base = OTHER; note = 2'-O-methyladenosine-3'-phosphorothioate
  modified_base 2: mod_base = OTHER; note = 2'-deoxy-2'-fluorouridine-3'-phosphorothioate
  modified_base 3: mod_base = OTHER; note = 2'-O-methylguanosine-3'-phosphate
  modified_base 4: mod_base = OTHER; note = 2'-O-methylguanosine-3'-phosphate
  modified_base 5: mod_base = OTHER; note = 2'-O-methylguanosine-3'-phosphate
  modified_base 6: mod_base = OTHER; note = 2'-O-methylcytidine-3'-phosphate
  modified_base 7: mod_base = OTHER; note = Cytidine-glycol nucleic acid (GNA), S-isomer
  modified_base 8: mod_base = OTHER; note = 2'-O-methyladenosine-3'-phosphate
  modified_base 9: mod_base = OTHER; note = 2'-O-methylcytidine-3'-phosphate
  modified_base 10: mod_base = OTHER; note = 2'-O-methylcytidine-3'-phosphate
  modified_base 11: mod_base = OTHER; note = 2'-O-methyluridine-3'-phosphate
  modified_base 12: mod_base = OTHER; note = 2'-O-methylguanosine-3'-phosphate
  modified_base 13: mod_base = OTHER; note = 2'-O-methylguanosine-3'-phosphate
  modified_base 14: mod_base = OTHER; note = 2'-deoxy-2'-fluoroguanosine-3'-phosphate
  modified_base 15: mod_base = OTHER; note = 2'-O-methyladenosine-3'-phosphate
  modified_base 16: mod_base = OTHER; note = 2'-deoxy-2'-fluorocytidine-3'-phosphate
  modified_base 17: mod_base = OTHER; note = 2'-O-methyluridine-3'-phosphate
  modified_base 18: mod_base = OTHER; note = 2'-O-methylcytidine-3'-phosphate
  modified_base 19: mod_base = OTHER; note = 2'-O-methylcytidine-3'-phosphate
  modified_base 20: mod_base = OTHER; note = 2'-O-methyluridine-3'-phosphate
  modified_base 21: mod_base = OTHER; note = 2'-O-methylguanosine-3'-phosphorothioate
  modified_base 22: mod_base = OTHER; note = 2'-O-methylcytidine-3'-phosphorothioate
  modified_base 23: mod_base = OTHER; note = 2'-O-methyladenosine
atgggccacctgggactcctgca

SEQ ID NO: 825 - RNA, 23 nt, synthetic construct
  source 1..23: mol_type = other RNA
  modified_base 1: mod_base = OTHER; note = 2'-O-methyladenosine-3'-phosphorothioate
  modified_base 2: mod_base = OTHER; note = 2'-deoxy-2'-fluoroadenosine-3'-phosphorothioate
  modified_base 3: mod_base = OTHER; note = 2'-O-methylcytidine-3'-phosphate
  modified_base 4: mod_base = OTHER; note = 2'-O-methyluridine-3'-phosphate
  modified_base 5: mod_base = OTHER; note = 2'-O-methylguanosine-3'-phosphate
  modified_base 6: mod_base = OTHER; note = 2'-O-methyladenosine-3'-phosphate
  modified_base 7: mod_base = OTHER; note = Adenosine-glycol nucleic acid (GNA), S-isomer
  modified_base 8: mod_base = OTHER; note = 2'-O-methylguanosine-3'-phosphate
  modified_base 9: mod_base = OTHER; note = 2'-O-methylcytidine-3'-phosphate
  modified_base 10: mod_base = OTHER; note = 2'-O-methylcytidine-3'-phosphate
  modified_base 11: mod_base = OTHER; note = 2'-O-methyladenosine-3'-phosphate
  modified_base 12: mod_base = OTHER; note = 2'-O-methyluridine-3'-phosphate
  modified_base 13: mod_base = OTHER; note = 2'-O-methylcytidine-3'-phosphate
  modified_base 14: mod_base = OTHER; note = 2'-deoxy-2'-fluoroguanosine-3'-phosphate
  modified_base 15: mod_base = OTHER; note = 2'-O-methylguanosine-3'-phosphate
  modified_base 16: mod_base = OTHER; note = 2'-deoxy-2'-fluorouridine-3'-phosphate
  modified_base 17: mod_base = OTHER; note = 2'-O-methylcytidine-3'-phosphate
  modified_base 18: mod_base = OTHER; note = 2'-O-methyladenosine-3'-phosphate
  modified_base 19: mod_base = OTHER; note = 2'-O-methylcytidine-3'-phosphate
  modified_base 20: mod_base = OTHER; note = 2'-O-methylcytidine-3'-phosphate
  modified_base 21: mod_base = OTHER; note = 2'-O-methylcytidine-3'-phosphorothioate
  modified_base 22: mod_base = OTHER; note = 2'-O-methyladenosine-3'-phosphorothioate
  modified_base 23: mod_base = OTHER; note = 2'-O-methylguanosine
aactgaagccatcggtcacccag

SEQ ID NO: 826 - RNA, 23 nt, synthetic construct
  source 1..23: mol_type = other RNA
  modified_base 1: mod_base = OTHER; note = 2'-O-methyladenosine-3'-phosphorothioate
  modified_base 2: mod_base = OTHER; note = 2'-deoxy-2'-fluorocytidine-3'-phosphorothioate
  modified_base 3: mod_base = OTHER; note = 2'-O-methyluridine-3'-phosphate
  modified_base 4: mod_base = OTHER; note = 2'-O-methylguanosine-3'-phosphate
  modified_base 5: mod_base = OTHER; note = 2'-O-methylguanosine-3'-phosphate
  modified_base 6: mod_base = OTHER; note = 2'-O-methylguanosine-3'-phosphate
  modified_base 7: mod_base = OTHER; note = Cytidine-glycol nucleic acid (GNA), S-isomer
  modified_base 8: mod_base = OTHER; note = 2'-O-methylcytidine-3'-phosphate
  modified_base 9: mod_base = OTHER; note = 2'-O-methyladenosine-3'-phosphate
  modified_base 10: mod_base = OTHER; note = 2'-O-methylcytidine-3'-phosphate
  modified_base 11: mod_base = OTHER; note = 2'-O-methylcytidine-3'-phosphate
  modified_base 12: mod_base = OTHER; note = 2'-O-methyluridine-3'-phosphate
  modified_base 13: mod_base = OTHER; note = 2'-O-methylguanosine-3'-phosphate
  modified_base 14: mod_base = OTHER; note = 2'-deoxy-2'-fluoroguanosine-3'-phosphate
  modified_base 15: mod_base = OTHER; note = 2'-O-methylguanosine-3'-phosphate
  modified_base 16: mod_base = OTHER; note = 2'-deoxy-2'-fluoroadenosine-3'-phosphate
  modified_base 17: mod_base = OTHER; note = 2'-O-methylcytidine-3'-phosphate
  modified_base 18: mod_base = OTHER; note = 2'-O-methyluridine-3'-phosphate
  modified_base 19: mod_base = OTHER; note = 2'-O-methylcytidine-3'-phosphate
  modified_base 20: mod_base = OTHER; note = 2'-O-methylcytidine-3'-phosphate
  modified_base 21: mod_base = OTHER; note = 2'-O-methyluridine-3'-phosphorothioate
  modified_base 22: mod_base = OTHER; note = 2'-O-methylguanosine-3'-phosphorothioate
  modified_base 23: mod_base = OTHER; note = 2'-O-methylcytidine
actgggccacctgggactcctgc

SEQ ID NO: 827 - RNA, 23 nt, synthetic construct
  source 1..23: mol_type = other RNA
  modified_base 1: mod_base = OTHER; note = 2'-O-methyladenosine-3'-phosphorothioate
  modified_base 2: mod_base = OTHER; note = 2'-deoxy-2'-fluorocytidine-3'-phosphorothioate
  modified_base 3: mod_base = OTHER; note = 2'-O-methyluridine-3'-phosphate
  modified_base 4: mod_base = OTHER; note = 2'-O-methylguanosine-3'-phosphate
  modified_base 5: mod_base = OTHER; note = 2'-O-methylcytidine-3'-phosphate
  modified_base 6: mod_base = OTHER; note = 2'-O-methyluridine-3'-phosphate
  modified_base 7: mod_base = OTHER; note = Guanosine-glycol nucleic acid (GNA), S-isomer
  modified_base 8: mod_base = OTHER; note = 2'-O-methylguanosine-3'-phosphate
  modified_base 9: mod_base = OTHER; note = 2'-O-methylguanosine-3'-phosphate
  modified_base 10: mod_base = OTHER; note = 2'-O-methylcytidine-3'-phosphate
  modified_base 11: mod_base = OTHER; note = 2'-O-methylcytidine-3'-phosphate
  modified_base 12: mod_base = OTHER; note = 2'-O-methyladenosine-3'-phosphate
  modified_base 13: mod_base = OTHER; note = 2'-O-methylcytidine-3'-phosphate
  modified_base 14: mod_base = OTHER; note = 2'-deoxy-2'-fluorocytidine-3'-phosphate
  modified_base 15: mod_base = OTHER; note = 2'-O-methyluridine-3'-phosphate
  modified_base 16: mod_base = OTHER; note = 2'-deoxy-2'-fluoroguanosine-3'-phosphate
  modified_base 17: mod_base = OTHER; note = 2'-O-methylguanosine-3'-phosphate
  modified_base 18: mod_base = OTHER; note = 2'-O-methylguanosine-3'-phosphate
  modified_base 19: mod_base = OTHER; note = 2'-O-methyladenosine-3'-phosphate
  modified_base 20: mod_base = OTHER; note = 2'-O-methylcytidine-3'-phosphate
  modified_base 21: mod_base = OTHER; note = 2'-O-methyluridine-3'-phosphorothioate
  modified_base 22: mod_base = OTHER; note = 2'-O-methylcytidine-3'-phosphorothioate
  modified_base 23: mod_base = OTHER; note = 2'-O-methylcytidine
actgctgggccacctgggactcc

SEQ ID NO: 828 - RNA, 21 nt, synthetic construct
  source 1..21: mol_type = other RNA
cttaaaagggacagtattctc

SEQ ID NO: 829 - RNA, 23 nt, synthetic construct
  source 1..23: mol_type = other RNA
  modified_base 1: mod_base = OTHER; note = 2'-O-methyluridine-3'-phosphorothioate
  modified_base 2: mod_base = OTHER; note = 2'-deoxy-2'-fluoroadenosine-3'-phosphorothioate
  modified_base 3: mod_base = OTHER; note = 2'-O-methylguanosine-3'-phosphate
  modified_base 4: mod_base = OTHER; note = 2'-O-methyladenosine-3'-phosphate
  modified_base 5: mod_base = OTHER; note = 2'-O-methyladenosine-3'-phosphate
  modified_base 6: mod_base = OTHER; note = 2'-deoxy-2'-fluorouridine-3'-phosphate
  modified_base 7: mod_base = OTHER; note = 2'-O-methyladenosine-3'-phosphate
  modified_base 8: mod_base = OTHER; note = 2'-O-methylcytidine-3'-phosphate
  modified_base 9: mod_base = OTHER; note = 2'-O-methyluridine-3'-phosphate
  modified_base 10: mod_base = OTHER; note = 2'-O-methylguanosine-3'-phosphate
  modified_base 11: mod_base = OTHER; note = 2'-O-methyluridine-3'-phosphate
  modified_base 12: mod_base = OTHER; note = 2'-O-methylcytidine-3'-phosphate
  modified_base 13: mod_base = OTHER; note = 2'-O-methylcytidine-3'-phosphate
  modified_base 14: mod_base = OTHER; note = 2'-deoxy-2'-fluorocytidine-3'-phosphate
  modified_base 15: mod_base = OTHER; note = 2'-O-methyluridine-3'-phosphate
  modified_base 16: mod_base = OTHER; note = 2'-deoxy-2'-fluorouridine-3'-phosphate
  modified_base 17: mod_base = OTHER; note = 2'-O-methyluridine-3'-phosphate
  modified_base 18: mod_base = OTHER; note = 2'-O-methyluridine-3'-phosphate
  modified_base 19: mod_base = OTHER; note = 2'-O-methyladenosine-3'-phosphate
  modified_base 20: mod_base = OTHER; note = 2'-O-methyladenosine-3'-phosphate
  modified_base 21: mod_base = OTHER; note = 2'-O-methylguanosine-3'-phosphorothioate
  modified_base 22: mod_base = OTHER; note = 2'-O-methylcytidine-3'-phosphorothioate
  modified_base 23: mod_base = OTHER; note = 2'-O-methyladenosine
tagaatactgtcccttttaagca

SEQ ID NO: 830 - DNA, 23 bp, synthetic construct
  source 1..23: mol_type = other DNA
  modified_base 1: mod_base = OTHER; note = 2'-O-methyluridine-3'-phosphorothioate
  modified_base 2: mod_base = OTHER; note = 2'-deoxyadenosine-3'-phosphorothioate
  modified_base 3: mod_base = OTHER; note = 2'-O-methylguanosine-3'-phosphate
  modified_base 4: mod_base = OTHER; note = 2'-O-methyladenosine-3'-phosphate
  modified_base 5: mod_base = OTHER; note = 2'-O-methyladenosine-3'-phosphate
  modified_base 6: mod_base = OTHER; note = 2'-deoxy-2'-fluorouridine-3'-phosphate
  modified_base 7: mod_base = OTHER; note = 2'-O-methyladenosine-3'-phosphate
  modified_base 8: mod_base = OTHER; note = 2'-O-methylcytidine-3'-phosphate
  modified_base 9: mod_base = OTHER; note = 2'-O-methyluridine-3'-phosphate
  modified_base 10: mod_base = OTHER; note = 2'-O-methylguanosine-3'-phosphate
  modified_base 11: mod_base = OTHER; note = 2'-O-methyluridine-3'-phosphate
  modified_base 12: mod_base = OTHER; note = 2'-O-methylcytidine-3'-phosphate
  modified_base 13: mod_base = OTHER; note = 2'-O-methylcytidine-3'-phosphate
  modified_base 14: mod_base = OTHER; note = 2'-deoxy-2'-fluorocytidine-3'-phosphate
  modified_base 15: mod_base = OTHER; note = 2'-O-methyluridine-3'-phosphate
  modified_base 16: mod_base = OTHER; note = 2'-deoxy-2'-fluorouridine-3'-phosphate
  modified_base 17: mod_base = OTHER; note = 2'-O-methyluridine-3'-phosphate
  modified_base 18: mod_base = OTHER; note = 2'-O-methyluridine-3'-phosphate
  modified_base 19: mod_base = OTHER; note = 2'-O-methyladenosine-3'-phosphate
  modified_base 20: mod_base = OTHER; note = 2'-O-methyladenosine-3'-phosphate
  modified_base 21: mod_base = OTHER; note = 2'-O-methylguanosine-3'-phosphorothioate
  modified_base 22: mod_base = OTHER; note = 2'-O-methylcytidine-3'-phosphorothioate
  modified_base 23: mod_base = OTHER; note = 2'-O-methyladenosine
  misc_feature 1: note = RNA
  misc_feature 3..23: note = RNA
  misc_feature 2: note = DNA
tagaatactgtcccttttaagca

SEQ ID NO: 831 - RNA, 23 nt, synthetic construct
  source 1..23: mol_type = other RNA
  modified_base 1: mod_base = OTHER; note = 2'-O-methyluridine-3'-phosphorothioate
  modified_base 2: mod_base = OTHER; note = 2'-deoxy-2'-fluoroadenosine-3'-phosphorothioate
  modified_base 3: mod_base = OTHER; note = 2'-O-methylguanosine-3'-phosphate
  modified_base 4: mod_base = OTHER; note = 2'-O-methyladenosine-3'-phosphate
  modified_base 5: mod_base = OTHER; note = 2'-O-methyladenosine-3'-phosphate
  modified_base 6: mod_base = OTHER; note = 2'-deoxy-2'-fluorouridine-3'-phosphate
  modified_base 7: mod_base = OTHER; note = 2'-O-methyladenosine-3'-phosphate
  modified_base 8: mod_base = OTHER; note = 2'-O-methylcytidine-3'-phosphate
  modified_base 9: mod_base = OTHER; note = 2'-O-methyluridine-3'-phosphate
  modified_base 10: mod_base = OTHER; note = 2'-O-methylguanosine-3'-phosphate
  modified_base 11: mod_base = OTHER; note = 2'-O-methyluridine-3'-phosphate
  modified_base 12: mod_base = OTHER; note = 2'-O-methylcytidine-3'-phosphate
  modified_base 13: mod_base = OTHER; note = 2'-O-methylcytidine-3'-phosphate
  modified_base 14: mod_base = OTHER; note = 2'-deoxy-2'-fluorocytidine-3'-phosphate
  modified_base 15: mod_base = OTHER; note = 2'-O-methyluridine-3'-phosphate
  modified_base 16: mod_base = OTHER; note = 2'-deoxy-2'-fluorouridine-3'-phosphate
  modified_base 17: mod_base = OTHER; note = 2'-O-methyluridine-3'-phosphate
  modified_base 18: mod_base = OTHER; note = 2'-O-methyluridine-3'-phosphate
  modified_base 19: mod_base = OTHER; note = 2'-O-methyladenosine-3'-phosphate
  modified_base 20: mod_base = OTHER; note = 2'-O-methyladenosine-3'-phosphate
  modified_base 21: mod_base = OTHER; note = 2'-O-methylguanosine-3'-phosphorothioate
  modified_base 22: mod_base = OTHER; note = 2'-O-methylcytidine-3'-phosphorothioate
  modified_base 23: mod_base = OTHER; note = 2'-O-methylcytidine
tagaatactgtcccttttaagcc

SEQ ID NO: 832 - RNA, 19 nt, synthetic construct
  source 1..19: mol_type = other RNA
  modified_base 1: mod_base = OTHER; note = 2'-O-methyluridine-3'-phosphorothioate
  modified_base 2: mod_base = OTHER; note = 2'-O-methyladenosine-3'-phosphorothioate
  modified_base 3: mod_base = OTHER; note = 2'-O-methyladenosine-3'-phosphate
  modified_base 4: mod_base = OTHER; note = 2'-O-methyladenosine-3'-phosphate
  modified_base 5: mod_base = OTHER; note = 2'-deoxy-2'-fluoroadenosine-3'-phosphate
  modified_base 6: mod_base = OTHER; note = 2'-O-methylguanosine-3'-phosphate
  modified_base 7: mod_base = OTHER; note = 2'-deoxy-2'-fluoroguanosine-3'-phosphate
  modified_base 8: mod_base = OTHER; note = 2'-deoxy-2'-fluoroguanosine-3'-phosphate
  modified_base 9: mod_base = OTHER; note = 2'-deoxy-2'-fluoroadenosine-3'-phosphate
  modified_base 10: mod_base = OTHER; note = 2'-O-methylcytidine-3'-phosphate
  modified_base 11: mod_base = OTHER; note = 2'-O-methyladenosine-3'-phosphate
  modified_base 12: mod_base = OTHER; note = 2'-O-methylguanosine-3'-phosphate
  modified_base 13: mod_base = OTHER; note = 2'-O-methyluridine-3'-phosphate
  modified_base 14: mod_base = OTHER; note = 2'-O-methyladenosine-3'-phosphate
  modified_base 15: mod_base = OTHER; note = 2'-O-methyluridine-3'-phosphate
  modified_base 16: mod_base = OTHER; note = 2'-O-methyluridine-3'-phosphate
  modified_base 17: mod_base = OTHER; note = 2'-O-methylcytidine-3'-phosphate
  modified_base 18: mod_base = OTHER; note = 2'-O-methyluridine-3'-phosphate
  modified_base 19: mod_base = OTHER; note = 2'-O-methyladenosine-3'-phosphate ((2S,4R)-1-[29-[[2-(acetylamino)-2-deoxy-beta-D-galactopyra nosyl]oxy]-14,14-bis[[3-[[3-[[5-[[2-(acetylamino)-2-deoxy-b eta-D-galactopyranosyl]oxy]-1-oxopentyl]amino]propyl]amino] -3-oxopropoxy]methyl]-1,12,19,25-tetraoxo-16-oxa-13,20,24-t riazanonacos-1-yl]-4-hydroxy-2-pyrrolidinyl)methyl ester
taaaagggacagtattcta

SEQ ID NO: 833 - RNA, 21 nt, synthetic construct
  source 1..21: mol_type = other RNA
  modified_base 1: mod_base = OTHER; note = 2'-O-methyluridine-3'-phosphorothioate
  modified_base 2: mod_base = OTHER; note = 2'-deoxy-2'-fluoroadenosine-3'-phosphorothioate
  modified_base 3: mod_base = OTHER; note = 2'-O-methylguanosine-3'-phosphate
  modified_base 4: mod_base = OTHER; note = 2'-O-methyladenosine-3'-phosphate
  modified_base 5: mod_base = OTHER; note = 2'-O-methyladenosine-3'-phosphate
  modified_base 6: mod_base = OTHER; note = 2'-deoxy-2'-fluorouridine-3'-phosphate
  modified_base 7: mod_base = OTHER; note = 2'-O-methyladenosine-3'-phosphate
  modified_base 8: mod_base = OTHER; note = 2'-O-methylcytidine-3'-phosphate
  modified_base 9: mod_base = OTHER; note = 2'-O-methyluridine-3'-phosphate
  modified_base 10: mod_base = OTHER; note = 2'-O-methylguanosine-3'-phosphate
  modified_base 11: mod_base = OTHER; note = 2'-O-methyluridine-3'-phosphate
  modified_base 12: mod_base = OTHER; note = 2'-O-methylcytidine-3'-phosphate
  modified_base 13: mod_base = OTHER; note = 2'-O-methylcytidine-3'-phosphate
  modified_base 14: mod_base = OTHER; note = 2'-deoxy-2'-fluorocytidine-3'-phosphate
  modified_base 15: mod_base = OTHER; note = 2'-O-methyluridine-3'-phosphate
  modified_base 16: mod_base = OTHER; note = 2'-deoxy-2'-fluorouridine-3'-phosphate
  modified_base 17: mod_base = OTHER; note = 2'-O-methyluridine-3'-phosphate
  modified_base 18: mod_base = OTHER; note = 2'-O-methyluridine-3'-phosphate
  modified_base 19: mod_base = OTHER; note = 2'-O-methyladenosine-3'-phosphorothioate
  modified_base 20: mod_base = OTHER; note = 2'-O-methyladenosine-3'-phosphorothioate
  modified_base 21: mod_base = OTHER; note = 2'-O-methylguanosine
tagaatactgtcccttttaag

SEQ ID NO: 834 - DNA, 21 bp, synthetic construct
  source 1..21: mol_type = other DNA
  modified_base 1: mod_base = OTHER; note = 2'-O-methyluridine-3'-phosphorothioate
  modified_base 2: mod_base = OTHER; note = 2'-deoxyadenosine-3'-phosphorothioate
  modified_base 3: mod_base = OTHER; note = 2'-O-methylguanosine-3'-phosphate
  modified_base 4: mod_base = OTHER; note = 2'-O-methyladenosine-3'-phosphate
  modified_base 6: mod_base = OTHER; note = 2'-O-methyluridine-3'-phosphate
  modified_base 8: mod_base = OTHER; note = 2'-O-methylcytidine-3'-phosphate
  modified_base 9: mod_base = OTHER; note = 2'-O-methyluridine-3'-phosphate
  modified_base 10: mod_base = OTHER; note = 2'-O-methylguanosine-3'-phosphate
  modified_base 11: mod_base = OTHER; note = 2'-O-methyluridine-3'-phosphate
  modified_base 12: mod_base = OTHER; note = 2'-O-methylcytidine-3'-phosphate
  modified_base 13: mod_base = OTHER; note = 2'-O-methylcytidine-3'-phosphate
  modified_base 14: mod_base = OTHER; note = 2'-deoxy-2'-fluorocytidine-3'-phosphate
  modified_base 15: mod_base = OTHER; note = 2'-O-methyluridine-3'-phosphate
  modified_base 16: mod_base = OTHER; note = 2'-deoxy-2'-fluorouridine-3'-phosphate
  modified_base 17: mod_base = OTHER; note = 2'-O-methyluridine-3'-phosphate
  modified_base 18: mod_base = OTHER; note = 2'-O-methyluridine-3'-phosphate
  modified_base 19: mod_base = OTHER; note = 2'-O-methyladenosine-3'-phosphorothioate
  modified_base 20: mod_base = OTHER; note = 2'-O-methyladenosine-3'-phosphorothioate
  modified_base 21: mod_base = OTHER; note = 2'-O-methylguanosine
  misc_feature 1: note = RNA
  misc_feature 3..4: note = RNA
  misc_feature 6: note = RNA
  misc_feature 8..21: note = RNA
  misc_feature 2: note = DNA
  misc_feature 5: note = DNA
  misc_feature 7: note = DNA
tagaatactgtcccttttaag

SEQ ID NO: 835 - DNA, 21 bp, synthetic construct
  source 1..21: mol_type = other DNA
  modified_base 1: mod_base = OTHER; note = 2'-O-methylcytidine-3'-phosphorothioate
  modified_base 2: mod_base = OTHER; note = 2'-O-methyluridine-3'-phosphorothioate
  modified_base 3: mod_base = OTHER; note = 2'-O-methyluridine-3'-phosphate
  modified_base 4: mod_base = OTHER; note = 2'-O-methyladenosine-3'-phosphate
  modified_base 5: mod_base = OTHER; note = 2'-O-methyladenosine-3'-phosphate
  modified_base 6: mod_base = OTHER; note = 2'-O-methyladenosine-3'-phosphate
  modified_base 7: mod_base = OTHER; note = 2'-O-methyladenosine-3'-phosphate
  modified_base 8: mod_base = OTHER; note = 2'-O-methylguanosine-3'-phosphate
  modified_base 10: mod_base = OTHER; note = 2'-O-methylguanosine-3'-phosphate
  modified_base 12: mod_base = OTHER; note = 2'-O-methylcytidine-3'-phosphate
  modified_base 13: mod_base = OTHER; note = 2'-O-methyladenosine-3'-phosphate
  modified_base 14: mod_base = OTHER; note = 2'-O-methylguanosine-3'-phosphate
  modified_base 15: mod_base = OTHER; note = 2'-O-methyluridine-3'-phosphate
  modified_base 16: mod_base = OTHER; note = 2'-O-methyladenosine-3'-phosphate
  modified_base 17: mod_base = OTHER; note = 2'-O-methyluridine-3'-phosphate
  modified_base 18: mod_base = OTHER; note = 2'-O-methyluridine-3'-phosphate
  modified_base 19: mod_base = OTHER; note = 2'-O-methylcytidine-3'-phosphate
  modified_base 20: mod_base = OTHER; note = 2'-O-methyluridine-3'-phosphate
  modified_base 21: mod_base = OTHER; note = 2'-O-methyladenosine-3'-phosphate ((2S,4R)-1-[29-[[2-(acetylamino)-2-deoxy-beta-D-galactopyra nosyl]oxy]-14,14-bis[[3-[[3-[[5-[[2-(acetylamino)-2-deoxy-b eta-D-galactopyranosyl]oxy]-1-oxopentyl]amino]propyl]amino] -3-oxopropoxy]methyl]-1,12,19,25-tetraoxo-16-oxa-13,20,24-t riazanonacos-1-yl]-4-hydroxy-2-pyrrolidinyl)methyl ester
  misc_feature 1..8: note = RNA
  misc_feature 10: note = RNA
  misc_feature 12..21: note = RNA
  misc_feature 9: note = DNA
  misc_feature 11: note = DNA
cttaaaagggacagtattcta

SEQ ID NO: 836 - DNA, 21 bp, synthetic construct
  source 1..21: mol_type = other DNA
  modified_base 1: mod_base = OTHER; note = 2'-O-methylcytidine-3'-phosphorothioate
  modified_base 2: mod_base = OTHER; note = 2'-O-methyluridine-3'-phosphorothioate
  modified_base 3: mod_base = OTHER; note = 2'-O-methyluridine-3'-phosphate
  modified_base 4: mod_base = OTHER; note = 2'-O-methyladenosine-3'-phosphate
  modified_base 5: mod_base = OTHER; note = 2'-O-methyladenosine-3'-phosphate
  modified_base 6: mod_base = OTHER; note = 2'-O-methyladenosine-3'-phosphate
  modified_base 7: mod_base = OTHER; note = 2'-O-methyladenosine-3'-phosphate
  modified_base 8: mod_base = OTHER; note = 2'-O-methylguanosine-3'-phosphate
  modified_base 10: mod_base = OTHER; note = 2'-O-methylguanosine-3'-phosphate
  modified_base 12: mod_base = OTHER; note = 2'-deoxy-2'-fluorocytidine-3'-phosphate
  modified_base 13: mod_base = OTHER; note = 2'-O-methyladenosine-3'-phosphate
  modified_base 14: mod_base = OTHER; note = 2'-O-methylguanosine-3'-phosphate
  modified_base 15: mod_base = OTHER; note = 2'-O-methyluridine-3'-phosphate
  modified_base 16: mod_base = OTHER; note = 2'-O-methyladenosine-3'-phosphate
  modified_base 17: mod_base = OTHER; note = 2'-O-methyluridine-3'-phosphate
  modified_base 18: mod_base = OTHER; note = 2'-O-methyluridine-3'-phosphate
  modified_base 19: mod_base = OTHER; note = 2'-O-methylcytidine-3'-phosphate
  modified_base 20: mod_base = OTHER; note = 2'-O-methyluridine-3'-phosphate
  modified_base 21: mod_base = OTHER; note = 2'-O-methyladenosine-3'-phosphate ((2S,4R)-1-[29-[[2-(acetylamino)-2-deoxy-beta-D-galactopyra nosyl]oxy]-14,14-bis[[3-[[3-[[5-[[2-(acetylamino)-2-deoxy-b eta-D-galactopyranosyl]oxy]-1-oxopentyl]amino]propyl]amino] -3-oxopropoxy]methyl]-1,12,19,25-tetraoxo-16-oxa-13,20,24-t riazanonacos-1-yl]-4-hydroxy-2-pyrrolidinyl)methyl ester
  misc_feature 1..8: note = RNA
  misc_feature 10: note = RNA
  misc_feature 12..21: note = RNA
  misc_feature 9: note = DNA
  misc_feature 11: note = DNA
cttaaaagggacagtattcta

SEQ ID NO: 837 - RNA, 23 nt, synthetic construct
  source 1..23: mol_type = other RNA
  modified_base 1: mod_base = OTHER; note = 2'-O-methyladenosine-3'-phosphorothioate
  modified_base 2: mod_base = OTHER; note = 2'-deoxy-2'-fluoroguanosine-3'-phosphorothioate
  modified_base 3: mod_base = OTHER; note = 2'-O-methyladenosine-3'-phosphate
  modified_base 4: mod_base = OTHER; note = 2'-O-methyladenosine-3'-phosphate
  modified_base 5: mod_base = OTHER; note = 2'-O-methyluridine-3'-phosphate
  modified_base 6: mod_base = OTHER; note = 2'-deoxy-2'-fluoroadenosine-3'-phosphate
  modified_base 7: mod_base = OTHER; note = 2'-O-methylcytidine-3'-phosphate
  modified_base 8: mod_base = OTHER; note = 2'-O-methyluridine-3'-phosphate
  modified_base 9: mod_base = OTHER; note = 2'-O-methylguanosine-3'-phosphate
  modified_base 10: mod_base = OTHER; note = 2'-O-methyluridine-3'-phosphate
  modified_base 11: mod_base = OTHER; note = 2'-O-methylcytidine-3'-phosphate
  modified_base 12: mod_base = OTHER; note = 2'-O-methylcytidine-3'-phosphate
  modified_base 13: mod_base = OTHER; note = 2'-O-methylcytidine-3'-phosphate
  modified_base 14: mod_base = OTHER; note = 2'-deoxy-2'-fluorouridine-3'-phosphate
  modified_base 15: mod_base = OTHER; note = 2'-O-methyluridine-3'-phosphate
  modified_base 16: mod_base = OTHER; note = 2'-deoxy-2'-fluorouridine-3'-phosphate
  modified_base 17: mod_base = OTHER; note = 2'-O-methyluridine-3'-phosphate
  modified_base 18: mod_base = OTHER; note = 2'-O-methyladenosine-3'-phosphate
  modified_base 19: mod_base = OTHER; note = 2'-O-methyladenosine-3'-phosphate
  modified_base 20: mod_base = OTHER; note = 2'-O-methylguanosine-3'-phosphate
  modified_base 21: mod_base = OTHER; note = 2'-O-methylcytidine-3'-phosphorothioate
  modified_base 22: mod_base = OTHER; note = 2'-O-methyladenosine-3'-phosphorothioate
  modified_base 23: mod_base = OTHER; note = 2'-O-methyladenosine
agaatactgtcccttttaagcaa

SEQ ID NO: 838 - DNA, 23 bp, synthetic construct
  source 1..23: mol_type = other DNA
  modified_base 1: mod_base = OTHER; note = 2'-O-methyladenosine-3'-phosphorothioate
  modified_base 2: mod_base = OTHER; note = 2'-deoxyguanosine-3'-phosphorothioate
  modified_base 3: mod_base = OTHER; note = 2'-O-methyladenosine-3'-phosphate
  modified_base 4: mod_base = OTHER; note = 2'-O-methyladenosine-3'-phosphate
  modified_base 5: mod_base = OTHER; note = 2'-O-methyluridine-3'-phosphate
  modified_base 6: mod_base = OTHER; note = 2'-deoxy-2'-fluoroadenosine-3'-phosphate
  modified_base 7: mod_base = OTHER; note = 2'-O-methylcytidine-3'-phosphate
  modified_base 8: mod_base = OTHER; note = 2'-O-methyluridine-3'-phosphate
  modified_base 9: mod_base = OTHER; note = 2'-O-methylguanosine-3'-phosphate
  modified_base 10: mod_base = OTHER; note = 2'-O-methyluridine-3'-phosphate
  modified_base 11: mod_base = OTHER; note = 2'-O-methylcytidine-3'-phosphate
  modified_base 12: mod_base = OTHER; note = 2'-O-methylcytidine-3'-phosphate
  modified_base 13: mod_base = OTHER; note = 2'-O-methylcytidine-3'-phosphate
  modified_base 14: mod_base = OTHER; note = 2'-deoxy-2'-fluorouridine-3'-phosphate
  modified_base 15: mod_base = OTHER; note = 2'-O-methyluridine-3'-phosphate
  modified_base 16: mod_base = OTHER; note = 2'-deoxy-2'-fluorouridine-3'-phosphate
  modified_base 17: mod_base = OTHER; note = 2'-O-methyluridine-3'-phosphate
  modified_base 18: mod_base = OTHER; note = 2'-O-methyladenosine-3'-phosphate
  modified_base 19: mod_base = OTHER; note = 2'-O-methyladenosine-3'-phosphate
  modified_base 20: mod_base = OTHER; note = 2'-O-methylguanosine-3'-phosphate
  modified_base 21: mod_base = OTHER; note = 2'-O-methylcytidine-3'-phosphorothioate
  modified_base 22: mod_base = OTHER; note = 2'-O-methyladenosine-3'-phosphorothioate
  modified_base 23: mod_base = OTHER; note = 2'-O-methyladenosine
  misc_feature 1: note = RNA
  misc_feature 3..23: note = RNA
  misc_feature 2: note = DNA
agaatactgtcccttttaagcaa

SEQ ID NO: 839 - DNA, 23 bp, synthetic construct
  source 1..23: mol_type = other DNA
  modified_base 1: mod_base = OTHER; note = 2'-O-methyladenosine-3'-phosphorothioate
  modified_base 2: mod_base = OTHER; note = 2'-deoxyguanosine-3'-phosphorothioate
  modified_base 3: mod_base = OTHER; note = 2'-O-methyladenosine-3'-phosphate
  modified_base 4: mod_base = OTHER; note = 2'-O-methyladenosine-3'-phosphate
  modified_base 6: mod_base = OTHER; note = 2'-O-methyladenosine-3'-phosphate
  modified_base 8: mod_base = OTHER; note = 2'-O-methyluridine-3'-phosphate
  modified_base 9: mod_base = OTHER; note = 2'-O-methylguanosine-3'-phosphate
  modified_base 10: mod_base = OTHER; note = 2'-O-methyluridine-3'-phosphate
  modified_base 11: mod_base = OTHER; note = 2'-O-methylcytidine-3'-phosphate
  modified_base 12: mod_base = OTHER; note = 2'-O-methylcytidine-3'-phosphate
  modified_base 13: mod_base = OTHER; note = 2'-O-methylcytidine-3'-phosphate
  modified_base 14: mod_base = OTHER; note = 2'-deoxy-2'-fluorouridine-3'-phosphate
  modified_base 15: mod_base = OTHER; note = 2'-O-methyluridine-3'-phosphate
  modified_base 16: mod_base = OTHER; note = 2'-deoxy-2'-fluorouridine-3'-phosphate
  modified_base 17: mod_base = OTHER; note = 2'-O-methyluridine-3'-phosphate
  modified_base 18: mod_base = OTHER; note = 2'-O-methyladenosine-3'-phosphate
  modified_base 19: mod_base = OTHER; note = 2'-O-methyladenosine-3'-phosphate
  modified_base 20: mod_base = OTHER; note = 2'-O-methylguanosine-3'-phosphate
  modified_base 21: mod_base = OTHER; note = 2'-O-methylcytidine-3'-phosphorothioate
  modified_base 22: mod_base = OTHER; note = 2'-O-methyladenosine-3'-phosphorothioate
  modified_base 23: mod_base = OTHER; note = 2'-O-methyladenosine
  misc_feature 1: note = RNA
  misc_feature 3..4: note = RNA
  misc_feature 6: note = RNA
  misc_feature 8..23: note = RNA
  misc_feature 2: note = DNA
  misc_feature 5: note = DNA
  misc_feature 7: note = DNA
agaatactgtcccttttaagcaa

SEQ ID NO: 840 - DNA, 23 bp, synthetic construct
  source 1..23: mol_type = other DNA
  modified_base 1: mod_base = OTHER; note = 2'-O-methyladenosine-3'-phosphorothioate
  modified_base 2: mod_base = OTHER; note = 2'-deoxyguanosine-3'-phosphorothioate
  modified_base 3: mod_base = OTHER; note = 2'-O-methyladenosine-3'-phosphate
  modified_base 4: mod_base = OTHER; note = 2'-O-methyladenosine-3'-phosphate
  modified_base 5: mod_base = OTHER; note = 2'-O-methyluridine-3'-phosphate
  modified_base 6: mod_base = OTHER; note = 2'-deoxy-2'-fluoroadenosine-3'-phosphate
  modified_base 7: mod_base = OTHER; note = 2'-O-methylcytidine-3'-phosphate
  modified_base 8: mod_base = OTHER; note = 2'-O-methyluridine-3'-phosphate
  modified_base 9: mod_base = OTHER; note = 2'-O-methylguanosine-3'-phosphate
  modified_base 10: mod_base = OTHER; note = 2'-O-methyluridine-3'-phosphate
  modified_base 11: mod_base = OTHER; note = 2'-O-methylcytidine-3'-phosphate
  modified_base 12: mod_base = OTHER; note = 2'-O-methylcytidine-3'-phosphate
  modified_base 13: mod_base = OTHER; note = 2'-O-methylcytidine-3'-phosphate
  modified_base 14: mod_base = OTHER; note = 2'-deoxy-2'-fluorouridine-3'-phosphate
  modified_base 15: mod_base = OTHER; note = 2'-O-methyluridine-3'-phosphate
  modified_base 16: mod_base = OTHER; note = 2'-deoxy-2'-fluorouridine-3'-phosphate
  modified_base 17: mod_base = OTHER; note = 2'-O-methyluridine-3'-phosphate
  modified_base 18: mod_base = OTHER; note = 2'-O-methyladenosine-3'-phosphate
  modified_base 19: mod_base = OTHER; note = 2'-O-methyladenosine-3'-phosphate
  modified_base 20: mod_base = OTHER; note = 2'-O-methylguanosine-3'-phosphate
  modified_base 21: mod_base = OTHER; note = 2'-O-methylcytidine-3'-phosphorothioate
  modified_base 22: mod_base = OTHER; note = 2'-O-methylguanosine-3'-phosphorothioate
  modified_base 23: mod_base = OTHER; note = 2'-O-methylcytidine
  misc_feature 1: note = RNA
  misc_feature 3..23: note = RNA
  misc_feature 2: note = DNA
agaatactgtcccttttaagcgc

SEQ ID NO: 841 - DNA, 23 bp, synthetic construct
  source 1..23: mol_type = other DNA
  modified_base 1: mod_base = OTHER; note = 2'-O-methyladenosine-3'-phosphorothioate
  modified_base 2: mod_base = OTHER; note = 2'-deoxyguanosine-3'-phosphorothioate
  modified_base 3: mod_base = OTHER; note = 2'-O-methyladenosine-3'-phosphate
  modified_base 4: mod_base = OTHER; note = 2'-O-methyladenosine-3'-phosphate
  modified_base 6: mod_base = OTHER; note = 2'-O-methyladenosine-3'-phosphate
  modified_base 8: mod_base = OTHER; note = 2'-O-methyluridine-3'-phosphate
  modified_base 9: mod_base = OTHER; note = 2'-O-methylguanosine-3'-phosphate
  modified_base 10: mod_base = OTHER; note = 2'-O-methyluridine-3'-phosphate
  modified_base 11: mod_base = OTHER; note = 2'-O-methylcytidine-3'-phosphate
  modified_base 12: mod_base = OTHER; note = 2'-O-methylcytidine-3'-phosphate
  modified_base 13: mod_base = OTHER; note = 2'-O-methylcytidine-3'-phosphate
  modified_base 14: mod_base = OTHER; note = 2'-deoxy-2'-fluorouridine-3'-phosphate
  modified_base 15: mod_base = OTHER; note = 2'-O-methyluridine-3'-phosphate
  modified_base 16: mod_base = OTHER; note = 2'-deoxy-2'-fluorouridine-3'-phosphate
  modified_base 17: mod_base = OTHER; note = 2'-O-methyluridine-3'-phosphate
  modified_base 18: mod_base = OTHER; note = 2'-O-methyladenosine-3'-phosphate
  modified_base 19: mod_base = OTHER; note = 2'-O-methyladenosine-3'-phosphate
  modified_base 20: mod_base = OTHER; note = 2'-O-methylguanosine-3'-phosphate
  modified_base 21: mod_base = OTHER; note = 2'-O-methylcytidine-3'-phosphorothioate
  modified_base 22: mod_base = OTHER; note = 2'-O-methylguanosine-3'-phosphorothioate
  modified_base 23: mod_base = OTHER; note = 2'-O-methylcytidine
  misc_feature 1: note = RNA
  misc_feature 3..4: note = RNA
  misc_feature 6: note = RNA
  misc_feature 8..23: note = RNA
  misc_feature 2: note = DNA
  misc_feature 5: note = DNA
  misc_feature 7: note = DNA
agaatactgtcccttttaagcgc

SEQ ID NO: 842 - RNA, 19 nt, synthetic construct
  source 1..19: mol_type = other RNA
  modified_base 1: mod_base = OTHER; note = 2'-O-methyluridine-3'-phosphorothioate
  modified_base 2: mod_base = OTHER; note = 2'-O-methyluridine-3'-phosphorothioate
  modified_base 3: mod_base = OTHER; note = 2'-O-methyladenosine-3'-phosphate
  modified_base 4: mod_base = OTHER; note = 2'-O-methyladenosine-3'-phosphate
  modified_base 5: mod_base = OTHER; note = 2'-deoxy-2'-fluoroadenosine-3'-phosphate
  modified_base 6: mod_base = OTHER; note = 2'-O-methyladenosine-3'-phosphate
  modified_base 7: mod_base = OTHER; note = 2'-deoxy-2'-fluoroguanosine-3'-phosphate
  modified_base 8: mod_base = OTHER; note = 2'-deoxy-2'-fluoroguanosine-3'-phosphate
  modified_base 9: mod_base = OTHER; note = 2'-deoxy-2'-fluoroguanosine-3'-phosphate
  modified_base 10: mod_base = OTHER; note = 2'-O-methyladenosine-3'-phosphate
  modified_base 11: mod_base = OTHER; note = 2'-O-methylcytidine-3'-phosphate
  modified_base 12: mod_base = OTHER; note = 2'-O-methyladenosine-3'-phosphate
  modified_base 13: mod_base = OTHER; note = 2'-O-methylguanosine-3'-phosphate
  modified_base 14: mod_base = OTHER; note = 2'-O-methyluridine-3'-phosphate
  modified_base 15: mod_base = OTHER; note = 2'-O-methyladenosine-3'-phosphate
  modified_base 16: mod_base = OTHER; note = 2'-O-methyluridine-3'-phosphate
  modified_base 17: mod_base = OTHER; note = 2'-O-methyluridine-3'-phosphate
  modified_base 18: mod_base = OTHER; note = 2'-O-methylcytidine-3'-phosphate
  modified_base 19: mod_base = OTHER; note = 2'-O-methyluridine-3'-phosphate ((2S,4R)-1-[29-[[2-(acetylamino)-2-deoxy-beta-D-galactopyra nosyl]oxy]-14,14-bis[[3-[[3-[[5-[[2-(acetylamino)-2-deoxy-b eta-D-galactopyranosyl]oxy]-1-oxopentyl]amino]propyl]amino] -3-oxopropoxy]methyl]-1,12,19,25-tetraoxo-16-oxa-13,20,24-t riazanonacos-1-yl]-4-hydroxy-2-pyrrolidinyl)methyl ester
ttaaaagggacagtattct

SEQ ID NO: 843 - DNA, 21 bp, synthetic construct
  source 1..21: mol_type = other DNA
  modified_base 1: mod_base = OTHER; note = 2'-O-methyladenosine-3'-phosphorothioate
  modified_base 2: mod_base = OTHER; note = 2'-deoxyguanosine-3'-phosphorothioate
  modified_base 3: mod_base = OTHER; note = 2'-O-methyladenosine-3'-phosphate
  modified_base 4: mod_base = OTHER; note = 2'-O-methyladenosine-3'-phosphate
  modified_base 5: mod_base = OTHER; note = 2'-O-methyluridine-3'-phosphate
  modified_base 6: mod_base = OTHER; note = 2'-deoxy-2'-fluoroadenosine-3'-phosphate
  modified_base 7: mod_base = OTHER; note = 2'-O-methylcytidine-3'-phosphate
  modified_base 8: mod_base = OTHER; note = 2'-O-methyluridine-3'-phosphate
  modified_base 9: mod_base = OTHER; note = 2'-O-methylguanosine-3'-phosphate
  modified_base 10: mod_base = OTHER; note = 2'-O-methyluridine-3'-phosphate
  modified_base 11: mod_base = OTHER; note = 2'-O-methylcytidine-3'-phosphate
  modified_base 12: mod_base = OTHER; note = 2'-O-methylcytidine-3'-phosphate
  modified_base 13: mod_base = OTHER; note = 2'-O-methylcytidine-3'-phosphate
  modified_base 14: mod_base = OTHER; note = 2'-deoxy-2'-fluorouridine-3'-phosphate
  modified_base 15: mod_base = OTHER; note = 2'-O-methyluridine-3'-phosphate
  modified_base 16: mod_base = OTHER; note = 2'-deoxy-2'-fluorouridine-3'-phosphate
  modified_base 17: mod_base = OTHER; note = 2'-O-methyluridine-3'-phosphate
  modified_base 18: mod_base = OTHER; note = 2'-O-methyladenosine-3'-phosphate
  modified_base 19: mod_base = OTHER; note = 2'-O-methyladenosine-3'-phosphorothioate
  modified_base 20: mod_base = OTHER; note = 2'-O-methylguanosine-3'-phosphorothioate
  modified_base 21: mod_base = OTHER; note = 2'-O-methylcytidine
  misc_feature 1: note = RNA
  misc_feature 3..21: note = RNA
  misc_feature 2: note = DNA
agaatactgtcccttttaagc

SEQ ID NO: 844 - RNA, 21 nt, synthetic construct
  source 1..21: mol_type = other RNA
gcttaaaagggacagtattct

SEQ ID NO: 845 - DNA, 21 bp, synthetic construct
  source 1..21: mol_type = other DNA
  modified_base 1: mod_base = OTHER; note = 2'-O-methyladenosine-3'-phosphorothioate
  modified_base 2: mod_base = OTHER; note = 2'-deoxyguanosine-3'-phosphorothioate
  modified_base 3: mod_base = OTHER; note = 2'-O-methyladenosine-3'-phosphate
  modified_base 4: mod_base = OTHER; note = 2'-O-methyladenosine-3'-phosphate
  modified_base 6: mod_base = OTHER; note = 2'-O-methyladenosine-3'-phosphate
  modified_base 8: mod_base = OTHER; note = 2'-O-methyluridine-3'-phosphate
  modified_base 9: mod_base = OTHER; note = 2'-O-methylguanosine-3'-phosphate
  modified_base 10: mod_base = OTHER; note = 2'-O-methyluridine-3'-phosphate
  modified_base 11: mod_base = OTHER; note = 2'-O-methylcytidine-3'-phosphate
  modified_base 12: mod_base = OTHER; note = 2'-O-methylcytidine-3'-phosphate
  modified_base 13: mod_base = OTHER; note = 2'-O-methylcytidine-3'-phosphate
  modified_base 14: mod_base = OTHER; note = 2'-deoxy-2'-fluorouridine-3'-phosphate
  modified_base 15: mod_base = OTHER; note = 2'-O-methyluridine-3'-phosphate
  modified_base 16: mod_base = OTHER; note = 2'-deoxy-2'-fluorouridine-3'-phosphate
  modified_base 17: mod_base = OTHER; note = 2'-O-methyluridine-3'-phosphate
  modified_base 18: mod_base = OTHER; note = 2'-O-methyladenosine-3'-phosphate
  modified_base 19: mod_base = OTHER; note = 2'-O-methyladenosine-3'-phosphorothioate
  modified_base 20: mod_base = OTHER; note = 2'-O-methylguanosine-3'-phosphorothioate
  modified_base 21: mod_base = OTHER; note = 2'-O-methylcytidine
  misc_feature 1: note = RNA
  misc_feature 3..4: note = RNA
  misc_feature 6: note = RNA
  misc_feature 8..21: note = RNA
  misc_feature 2: note = DNA
  misc_feature 5: note = DNA
  misc_feature 7: note = DNA
agaatactgtcccttttaagc

SEQ ID NO: 846 - DNA, 21 bp, synthetic construct
  source 1..21: mol_type = other DNA
  modified_base 1: mod_base = OTHER; note = 2'-O-methylguanosine-3'-phosphorothioate
  modified_base 2: mod_base = OTHER; note = 2'-O-methylcytidine-3'-phosphorothioate
  modified_base 3: mod_base = OTHER; note = 2'-O-methyluridine-3'-phosphate
  modified_base 4: mod_base = OTHER; note = 2'-O-methyluridine-3'-phosphate
  modified_base 5: mod_base = OTHER; note = 2'-O-methyladenosine-3'-phosphate
  modified_base 6: mod_base = OTHER; note = 2'-O-methyladenosine-3'-phosphate
  modified_base 7: mod_base = OTHER; note = 2'-O-methyladenosine-3'-phosphate
  modified_base 8: mod_base = OTHER; note = 2'-O-methyladenosine-3'-phosphate
  modified_base 10: mod_base = OTHER; note = 2'-O-methylguanosine-3'-phosphate
  modified_base 12: mod_base = OTHER; note = 2'-O-methyladenosine-3'-phosphate
  modified_base 13: mod_base = OTHER; note = 2'-O-methylcytidine-3'-phosphate
  modified_base 14: mod_base = OTHER; note = 2'-O-methyladenosine-3'-phosphate
  modified_base 15: mod_base = OTHER; note = 2'-O-methylguanosine-3'-phosphate
  modified_base 16: mod_base = OTHER; note = 2'-O-methyluridine-3'-phosphate
  modified_base 17: mod_base = OTHER; note = 2'-O-methyladenosine-3'-phosphate
  modified_base 18: mod_base = OTHER; note = 2'-O-methyluridine-3'-phosphate
  modified_base 19: mod_base = OTHER; note = 2'-O-methyluridine-3'-phosphate
  modified_base 20: mod_base = OTHER; note = 2'-O-methylcytidine-3'-phosphate
  modified_base 21: mod_base = OTHER; note = 2'-O-methyluridine-3'-phosphate ((2S,4R)-1-[29-[[2-(acetylamino)-2-deoxy-beta-D-galactopyra nosyl]oxy]-14,14-bis[[3-[[3-[[5-[[2-(acetylamino)-2-deoxy-b eta-D-galactopyranosyl]oxy]-1-oxopentyl]amino]propyl]amino] -3-oxopropoxy]methyl]-1,12,19,25-tetraoxo-16-oxa-13,20,24-t riazanonacos-1-yl]-4-hydroxy-2-pyrrolidinyl)methyl ester
  misc_feature 1..8: note = RNA
  misc_feature 10: note = RNA
  misc_feature 12..21: note = RNA
  misc_feature 9: note = DNA
  misc_feature 11: note = DNA
gcttaaaagggacagtattct

SEQ ID NO: 847 - DNA, 21 bp, synthetic construct
  source 1..21: mol_type = other DNA
  modified_base 1: mod_base = OTHER; note = 2'-O-methylguanosine-3'-phosphorothioate
  modified_base 2: mod_base = OTHER; note = 2'-O-methylcytidine-3'-phosphorothioate
  modified_base 3: mod_base = OTHER; note = 2'-O-methyluridine-3'-phosphate
  modified_base 4: mod_base = OTHER; note = 2'-O-methyluridine-3'-phosphate
  modified_base 5: mod_base = OTHER; note = 2'-O-methyladenosine-3'-phosphate
  modified_base 6: mod_base = OTHER; note = 2'-O-methyladenosine-3'-phosphate
  modified_base 7: mod_base = OTHER; note = 2'-O-methyladenosine-3'-phosphate
  modified_base 8: mod_base = OTHER; note = 2'-O-methyladenosine-3'-phosphate
  modified_base 10: mod_base = OTHER; note = 2'-O-methylguanosine-3'-phosphate
  modified_base 12: mod_base = OTHER; note = 2'-O-methyladenosine-3'-phosphate
  modified_base 14: mod_base = OTHER; note = 2'-O-methyladenosine-3'-phosphate
  modified_base 15: mod_base = OTHER; note = 2'-O-methylguanosine-3'-phosphate
  modified_base 16: mod_base = OTHER; note = 2'-O-methyluridine-3'-phosphate
  modified_base 17: mod_base = OTHER; note = 2'-O-methyladenosine-3'-phosphate
  modified_base 18: mod_base = OTHER; note = 2'-O-methyluridine-3'-phosphate
  modified_base 19: mod_base = OTHER; note = 2'-O-methyluridine-3'-phosphate
  modified_base 20: mod_base = OTHER; note = 2'-O-methylcytidine-3'-phosphate
  modified_base 21: mod_base = OTHER; note = 2'-O-methyluridine-3'-phosphate ((2S,4R)-1-[29-[[2-(acetylamino)-2-deoxy-beta-D-galactopyra nosyl]oxy]-14,14-bis[[3-[[3-[[5-[[2-(acetylamino)-2-deoxy-b eta-D-galactopyranosyl]oxy]-1-oxopentyl]amino]propyl]amino] -3-oxopropoxy]methyl]-1,12,19,25-tetraoxo-16-oxa-13,20,24-t riazanonacos-1-yl]-4-hydroxy-2-pyrrolidinyl)methyl ester
  misc_feature 1..8: note = RNA
  misc_feature 10: note = RNA
  misc_feature 12: note = RNA
  misc_feature 14..21: note = RNA
  misc_feature 9: note = DNA
  misc_feature 11: note = DNA
  misc_feature 13: note = DNA
gcttaaaagggacagtattct

SEQ ID NO: 848 - RNA, 21 nt, synthetic construct
  source 1..21: mol_type = other RNA
  modified_base 1: mod_base = OTHER; note = 2'-O-methyluridine-3'-phosphorothioate
  modified_base 2: mod_base = OTHER; note = 2'-O-methyladenosine-3'-phosphorothioate
  modified_base 3: mod_base = OTHER; note = 2'-O-methyladenosine-3'-phosphate
  modified_base 4: mod_base = OTHER; note = 2'-O-methyladenosine-3'-phosphate
  modified_base 5: mod_base = OTHER; note = 2'-O-methyladenosine-3'-phosphate
  modified_base 6: mod_base = OTHER; note = 2'-O-methylguanosine-3'-phosphate
  modified_base 7: mod_base = OTHER; note = 2'-deoxy-2'-fluoroguanosine-3'-phosphate
  modified_base 8: mod_base = OTHER; note = 2'-O-methylguanosine-3'-phosphate
  modified_base 9: mod_base = OTHER; note = 2'-deoxy-2'-fluoroadenosine-3'-phosphate
  modified_base 10: mod_base = OTHER; note = 2'-deoxy-2'-fluorocytidine-3'-phosphate
  modified_base 11: mod_base = OTHER; note = 2'-deoxy-2'-fluoroadenosine-3'-phosphate
  modified_base 12: mod_base = OTHER; note = 2'-O-methylguanosine-3'-phosphate
  modified_base 13: mod_base = OTHER; note = 2'-O-methyluridine-3'-phosphate
  modified_base 14: mod_base = OTHER; note = 2'-O-methyladenosine-3'-phosphate
  modified_base 15: mod_base = OTHER; note = 2'-O-methyluridine-3'-phosphate
  modified_base 16: mod_base = OTHER; note = 2'-O-methyluridine-3'-phosphate
  modified_base 17: mod_base = OTHER; note = 2'-O-methyluridine-3'-phosphate
  modified_base 18: mod_base = OTHER; note = 2'-O-methyluridine-3'-phosphate
  modified_base 19: mod_base = OTHER; note = 2'-O-methylcytidine-3'-phosphate
  modified_base 20: mod_base = OTHER; note = 2'-O-methyladenosine-3'-phosphate
  modified_base 21: mod_base = OTHER; note = 2'-O-methyluridine-3'-phosphate ((2S,4R)-1-[29-[[2-(acetylamino)-2-deoxy-beta-D-galactopyra nosyl]oxy]-14,14-bis[[3-[[3-[[5-[[2-(acetylamino)-2-deoxy-b eta-D-galactopyranosyl]oxy]-1-oxopentyl]amino]propyl]amino] -3-oxopropoxy]methyl]-1,12,19,25-tetraoxo-16-oxa-13,20,24-t riazanonacos-1-yl]-4-hydroxy-2-pyrrolidinyl)methyl ester
taaaagggacagtattttcat

SEQ ID NO: 849 - RNA, 23 nt, synthetic construct
  source 1..23: mol_type = other RNA
  modified_base 1: mod_base = OTHER; note = 2'-O-methyladenosine-3'-phosphorothioate
  modified_base 2: mod_base = OTHER; note = 2'-deoxy-2'-fluorouridine-3'-phosphorothioate
  modified_base 3: mod_base = OTHER; note = 2'-O-methylguanosine-3'-phosphate
  modified_base 4: mod_base = OTHER; note = 2'-O-methyladenosine-3'-phosphate
  modified_base 5: mod_base = OTHER; note = 2'-O-methyladenosine-3'-phosphate
  modified_base 6: mod_base = OTHER; note = 2'-deoxy-2'-fluoroadenosine-3'-phosphate
  modified_base 7: mod_base = OTHER; note = 2'-O-methyladenosine-3'-phosphate
  modified_base 8: mod_base = OTHER; note = 2'-deoxy-2'-fluorouridine-3'-phosphate
  modified_base 9: mod_base = OTHER; note = 2'-deoxy-2'-fluoroadenosine-3'-phosphate
  modified_base 10: mod_base = OTHER; note = 2'-O-methylcytidine-3'-phosphate
  modified_base 11: mod_base = OTHER; note = 2'-O-methyluridine-3'-phosphate
  modified_base 12: mod_base = OTHER; note = 2'-O-methylguanosine-3'-phosphate
  modified_base 13: mod_base = OTHER; note = 2'-O-methyluridine-3'-phosphate
  modified_base 14: mod_base = OTHER; note = 2'-deoxy-2'-fluorocytidine-3'-phosphate
  modified_base 15: mod_base = OTHER; note = 2'-O-methylcytidine-3'-phosphate
  modified_base 16: mod_base = OTHER; note = 2'-deoxy-2'-fluorocytidine-3'-phosphate
  modified_base 17: mod_base = OTHER; note = 2'-O-methyluridine-3'-phosphate
  modified_base 18: mod_base = OTHER; note = 2'-O-methyluridine-3'-phosphate
  modified_base 19: mod_base = OTHER; note = 2'-O-methyluridine-3'-phosphate
  modified_base 20: mod_base = OTHER; note = 2'-O-methyluridine-3'-phosphate
  modified_base 21: mod_base = OTHER; note = 2'-O-methyladenosine-3'-phosphorothioate
  modified_base 22: mod_base = OTHER; note = 2'-O-methyladenosine-3'-phosphorothioate
  modified_base 23: mod_base = OTHER; note = 2'-O-methylguanosine
atgaaaatactgtcccttttaag

SEQ ID NO: 850 - DNA, 23 bp, synthetic construct
  source 1..23: mol_type = other DNA
  modified_base 1: mod_base = OTHER; note = 2'-O-methyladenosine-3'-phosphorothioate
  modified_base 2: mod_base = OTHER; note = 2'-deoxy-2'-fluorouridine-3'-phosphorothioate
  modified_base 3: mod_base = OTHER; note = 2'-O-methylguanosine-3'-phosphate
  modified_base 4: mod_base = OTHER; note = 2'-O-methyladenosine-3'-phosphate
  modified_base 6: mod_base = OTHER; note = 2'-O-methyladenosine-3'-phosphate
  modified_base 7: mod_base = OTHER; note = Adenosine-glycol nucleic acid (GNA), S-isomer
  modified_base 8: mod_base = OTHER; note = 2'-O-methyluridine-3'-phosphate
  modified_base 9: mod_base = OTHER; note = 2'-O-methyladenosine-3'-phosphate
  modified_base 10: mod_base = OTHER; note = 2'-O-methylcytidine-3'-phosphate
  modified_base 11: mod_base = OTHER; note = 2'-O-methyluridine-3'-phosphate
  modified_base 12: mod_base = OTHER; note = 2'-O-methylguanosine-3'-phosphate
  modified_base 13: mod_base = OTHER; note = 2'-O-methyluridine-3'-phosphate
  modified_base 14: mod_base = OTHER; note = 2'-deoxy-2'-fluorocytidine-3'-phosphate
  modified_base 15: mod_base = OTHER; note = 2'-O-methylcytidine-3'-phosphate
  modified_base 16: mod_base = OTHER; note = 2'-deoxy-2'-fluorocytidine-3'-phosphate
  modified_base 17: mod_base = OTHER; note = 2'-O-methyluridine-3'-phosphate
  modified_base 18: mod_base = OTHER; note = 2'-O-methyluridine-3'-phosphate
  modified_base 19: mod_base = OTHER; note = 2'-O-methyluridine-3'-phosphate
  modified_base 20: mod_base = OTHER; note = 2'-O-methyluridine-3'-phosphate
  modified_base 21: mod_base = OTHER; note = 2'-O-methyladenosine-3'-phosphorothioate
  modified_base 22: mod_base = OTHER; note = 2'-O-methyladenosine-3'-phosphorothioate
  modified_base 23: mod_base = OTHER; note = 2'-O-methylguanosine
  misc_feature 1..4: note = RNA
  misc_feature 6..23: note = RNA
  misc_feature 5: note = DNA
atgagaatactgtcccttttaag

SEQ ID NO: 851 - DNA, 23 bp, synthetic construct
  source 1..23: mol_type = other DNA
  modified_base 1: mod_base = OTHER; note = 2'-O-methyladenosine-3'-phosphorothioate
  modified_base 2: mod_base = OTHER; note = 2'-deoxy-2'-fluorouridine-3'-phosphorothioate
  modified_base 3: mod_base = OTHER; note = 2'-O-methylguanosine-3'-phosphate
  modified_base 4: mod_base = OTHER; note = 2'-O-methyladenosine-3'-phosphate
  modified_base 6: mod_base = OTHER; note = 2'-O-methyladenosine-3'-phosphate
  modified_base 7: mod_base = OTHER; note = adenosine-2'-phosphate
  modified_base 8: mod_base = OTHER; note = 2'-O-methyluridine-3'-phosphate
  modified_base 9: mod_base = OTHER; note = 2'-O-methyladenosine-3'-phosphate
  modified_base 10: mod_base = OTHER; note = 2'-O-methylcytidine-3'-phosphate
  modified_base 11: mod_base = OTHER; note = 2'-O-methyluridine-3'-phosphate
  modified_base 12: mod_base = OTHER; note = 2'-O-methylguanosine-3'-phosphate
  modified_base 13: mod_base = OTHER; note = 2'-O-methyluridine-3'-phosphate
  modified_base 14: mod_base = OTHER; note = 2'-deoxy-2'-fluorocytidine-3'-phosphate
  modified_base 15: mod_base = OTHER; note = 2'-O-methylcytidine-3'-phosphate
  modified_base 16: mod_base = OTHER; note = 2'-deoxy-2'-fluorocytidine-3'-phosphate
  modified_base 17: mod_base = OTHER; note = 2'-O-methyluridine-3'-phosphate
  modified_base 18: mod_base = OTHER; note = 2'-O-methyluridine-3'-phosphate
  modified_base 19: mod_base = OTHER; note = 2'-O-methyluridine-3'-phosphate
  modified_base 20: mod_base = OTHER; note = 2'-O-methyluridine-3'-phosphate
  modified_base 21: mod_base = OTHER; note = 2'-O-methyladenosine-3'-phosphorothioate
  modified_base 22: mod_base = OTHER; note = 2'-O-methyladenosine-3'-phosphorothioate
  modified_base 23: mod_base = OTHER; note = 2'-O-methylguanosine
  misc_feature 1..4: note = RNA
  misc_feature 6..23: note = RNA
  misc_feature 5: note = DNA
atgagaatactgtcccttttaag

SEQ ID NO: 852 - DNA, 23 bp, synthetic construct
  source 1..23: mol_type = other DNA
  modified_base 1: mod_base = OTHER; note = 2'-O-methyladenosine-3'-phosphorothioate
  modified_base 2: mod_base = OTHER; note = 2'-deoxy-2'-fluorouridine-3'-phosphorothioate
  modified_base 3: mod_base = OTHER; note = 2'-O-methylguanosine-3'-phosphate
  modified_base 4: mod_base = OTHER; note = 2'-O-methyladenosine-3'-phosphate
  modified_base 6: mod_base = OTHER; note = 2'-O-methyladenosine-3'-phosphate
  modified_base 7: mod_base = OTHER; note = Adenosine-glycol nucleic acid (GNA), S-isomer
  modified_base 8: mod_base = OTHER; note = 2'-O-methyluridine-3'-phosphate
  modified_base 9: mod_base = OTHER; note = 2'-O-methyladenosine-3'-phosphate
  modified_base 10: mod_base = OTHER; note = 2'-O-methylcytidine-3'-phosphate
  modified_base 11: mod_base = OTHER; note = 2'-O-methyluridine-3'-phosphate
  modified_base 12: mod_base = OTHER; note = 2'-O-methylguanosine-3'-phosphate
  modified_base 13: mod_base = OTHER; note = 2'-O-methyluridine-3'-phosphate
  modified_base 14: mod_base = OTHER; note = 2'-deoxy-2'-fluorocytidine-3'-phosphate
  modified_base 15: mod_base = OTHER; note = 2'-O-methylcytidine-3'-phosphate
  modified_base 16: mod_base = OTHER; note = 2'-deoxy-2'-fluorocytidine-3'-phosphate
  modified_base 17: mod_base = OTHER; note = 2'-O-methyluridine-3'-phosphate
  modified_base 18: mod_base = OTHER; note = 2'-O-methyluridine-3'-phosphate
  modified_base 19: mod_base = OTHER; note = 2'-O-methyluridine-3'-phosphate
  modified_base 20: mod_base = OTHER; note = 2'-O-methyluridine-3'-phosphate
  modified_base 21: mod_base = OTHER; note = 2'-O-methyladenosine-3'-phosphorothioate
  modified_base 22: mod_base = OTHER; note = 2'-O-methylcytidine-3'-phosphorothioate
  modified_base 23: mod_base = OTHER; note = 2'-O-methylcytidine
  misc_feature 1..4: note = RNA
  misc_feature 6..23: note = RNA
  misc_feature 5: note = DNA
atgagaatactgtcccttttacc

SEQ ID NO: 853 - DNA, 23 bp, synthetic construct
  source 1..23: mol_type = other DNA
  modified_base 1: mod_base = OTHER; note = 2'-O-methyladenosine-3'-phosphorothioate
  modified_base 2: mod_base = OTHER; note = 2'-deoxy-2'-fluorouridine-3'-phosphorothioate
  modified_base 3: mod_base = OTHER; note = 2'-O-methylguanosine-3'-phosphate
  modified_base 4: mod_base = OTHER; note = 2'-O-methyladenosine-3'-phosphate
  modified_base 6: mod_base = OTHER; note = 2'-O-methyladenosine-3'-phosphate
  modified_base 7: mod_base = OTHER; note = adenosine-2'-phosphate
  modified_base 8: mod_base = OTHER; note = 2'-O-methyluridine-3'-phosphate
  modified_base 9: mod_base = OTHER; note = 2'-O-methyladenosine-3'-phosphate
  modified_base 10: mod_base = OTHER; note = 2'-O-methylcytidine-3'-phosphate
  modified_base 11: mod_base = OTHER; note = 2'-O-methyluridine-3'-phosphate
  modified_base 12: mod_base = OTHER; note = 2'-O-methylguanosine-3'-phosphate
  modified_base 13: mod_base = OTHER; note = 2'-O-methyluridine-3'-phosphate
  modified_base 14: mod_base = OTHER; note = 2'-deoxy-2'-fluorocytidine-3'-phosphate
  modified_base 15: mod_base = OTHER; note = 2'-O-methylcytidine-3'-phosphate
  modified_base 16: mod_base = OTHER; note = 2'-deoxy-2'-fluorocytidine-3'-phosphate
  modified_base 17: mod_base = OTHER; note = 2'-O-methyluridine-3'-phosphate
  modified_base 18: mod_base = OTHER; note = 2'-O-methyluridine-3'-phosphate
  modified_base 19: mod_base = OTHER; note = 2'-O-methyluridine-3'-phosphate
  modified_base 20: mod_base = OTHER; note = 2'-O-methyluridine-3'-phosphate
  modified_base 21: mod_base = OTHER; note = 2'-O-methyladenosine-3'-phosphorothioate
  modified_base 22: mod_base = OTHER; note = 2'-O-methylcytidine-3'-phosphorothioate
  modified_base 23: mod_base = OTHER; note = 2'-O-methylcytidine
  misc_feature 1..4: note = RNA
  misc_feature 6..23: note = RNA
  misc_feature 5: note = DNA
atgagaatactgtcccttttacc

SEQ ID NO: 854 - RNA, 19 nt, synthetic construct
  source 1..19: mol_type = other RNA
  modified_base 1: mod_base = OTHER; note = 2'-O-methyladenosine-3'-phosphorothioate
  modified_base 2: mod_base = OTHER; note = 2'-O-methyladenosine-3'-phosphorothioate
  modified_base 3: mod_base = OTHER; note = 2'-O-methyladenosine-3'-phosphate
  modified_base 4: mod_base = OTHER; note = 2'-O-methylguanosine-3'-phosphate
  modified_base 5: mod_base = OTHER; note = 2'-deoxy-2'-fluoroguanosine-3'-phosphate
  modified_base 6: mod_base = OTHER; note = 2'-O-methylguanosine-3'-phosphate
  modified_base 7: mod_base = OTHER; note = 2'-deoxy-2'-fluoroadenosine-3'-phosphate
  modified_base 8: mod_base = OTHER; note = 2'-deoxy-2'-fluorocytidine-3'-phosphate
  modified_base 9: mod_base = OTHER; note = 2'-deoxy-2'-fluoroadenosine-3'-phosphate
  modified_base 10: mod_base = OTHER; note = 2'-O-methylguanosine-3'-phosphate
  modified_base 11: mod_base = OTHER; note = 2'-O-methyluridine-3'-phosphate
  modified_base 12: mod_base = OTHER; note = 2'-O-methyladenosine-3'-phosphate
  modified_base 13: mod_base = OTHER; note = 2'-O-methyluridine-3'-phosphate
  modified_base 14: mod_base = OTHER; note = 2'-O-methyluridine-3'-phosphate
  modified_base 15: mod_base = OTHER; note = 2'-O-methylcytidine-3'-phosphate
  modified_base 16: mod_base = OTHER; note = 2'-O-methyluridine-3'-phosphate
  modified_base 17: mod_base = OTHER; note = 2'-O-methylcytidine-3'-phosphate
  modified_base 18: mod_base = OTHER; note = 2'-O-methyladenosine-3'-phosphate
  modified_base 19: mod_base = OTHER; note = 2'-O-methyluridine-3'-phosphate ((2S,4R)-1-[29-[[2-(acetylamino)-2-deoxy-beta-D-galactopyra nosyl]oxy]-14,14-bis[[3-[[3-[[5-[[2-(acetylamino)-2-deoxy-b eta-D-galactopyranosyl]oxy]-1-oxopentyl]amino]propyl]amino] -3-oxopropoxy]methyl]-1,12,19,25-tetraoxo-16-oxa-13,20,24-t riazanonacos-1-yl]-4-hydroxy-2-pyrrolidinyl)methyl ester
aaagggacagtattctcat

SEQ ID NO: 855 - DNA, 21 bp, synthetic construct
  source 1..21: mol_type = other DNA
  modified_base 1: mod_base = OTHER; note = 2'-O-methyladenosine-3'-phosphorothioate
  modified_base 2: mod_base = OTHER; note = 2'-deoxy-2'-fluorouridine-3'-phosphorothioate
  modified_base 3: mod_base = OTHER; note = 2'-O-methylguanosine-3'-phosphate
  modified_base 4: mod_base = OTHER; note = 2'-O-methyladenosine-3'-phosphate
  modified_base 6: mod_base = OTHER; note = 2'-O-methyladenosine-3'-phosphate
  modified_base 7: mod_base = OTHER; note = Adenosine-glycol nucleic acid (GNA), S-isomer
  modified_base 8: mod_base = OTHER; note = 2'-O-methyluridine-3'-phosphate
  modified_base 9: mod_base = OTHER; note = 2'-O-methyladenosine-3'-phosphate
  modified_base 10: mod_base = OTHER; note = 2'-O-methylcytidine-3'-phosphate
  modified_base 11: mod_base = OTHER; note = 2'-O-methyluridine-3'-phosphate
  modified_base 12: mod_base = OTHER; note = 2'-O-methylguanosine-3'-phosphate
  modified_base 13: mod_base = OTHER; note = 2'-O-methyluridine-3'-phosphate
  modified_base 14: mod_base = OTHER; note = 2'-deoxy-2'-fluorocytidine-3'-phosphate
  modified_base 15: mod_base = OTHER; note = 2'-O-methylcytidine-3'-phosphate
  modified_base 16: mod_base = OTHER; note = 2'-deoxy-2'-fluorocytidine-3'-phosphate
  modified_base 17: mod_base = OTHER; note = 2'-O-methyluridine-3'-phosphate
  modified_base 18: mod_base = OTHER; note = 2'-O-methyluridine-3'-phosphate
  modified_base 19: mod_base = OTHER; note = 2'-O-methyluridine-3'-phosphorothioate
  modified_base 20: mod_base = OTHER; note = 2'-O-methyluridine-3'-phosphorothioate
  modified_base 21: mod_base = OTHER; note = 2'-O-methylguanosine
  misc_feature 1..4: note = RNA
  misc_feature 6..21: note = RNA
  misc_feature 5: note = DNA
atgagaatactgtcccttttg

SEQ ID NO: 856 - RNA, 21 nt, synthetic construct
  source 1..21: mol_type = other RNA
taaaagggacagtattctcag

SEQ ID NO: 857 - DNA, 21 bp, synthetic construct
  source 1..21: mol_type = other DNA
  modified_base 1: mod_base = OTHER; note = 2'-O-methyladenosine-3'-phosphorothioate
  modified_base 2: mod_base = OTHER; note = 2'-deoxy-2'-fluorouridine-3'-phosphorothioate
  modified_base 3: mod_base = OTHER; note = 2'-O-methylguanosine-3'-phosphate
  modified_base 4: mod_base = OTHER; note = 2'-O-methyladenosine-3'-phosphate
  modified_base 6: mod_base = OTHER; note = 2'-O-methyladenosine-3'-phosphate
  modified_base 7: mod_base = OTHER; note = adenosine-2'-phosphate
  modified_base 8: mod_base = OTHER; note = 2'-O-methyluridine-3'-phosphate
  modified_base 9: mod_base = OTHER; note = 2'-O-methyladenosine-3'-phosphate
  modified_base 10: mod_base = OTHER; note = 2'-O-methylcytidine-3'-phosphate
  modified_base 11: mod_base = OTHER; note = 2'-O-methyluridine-3'-phosphate
  modified_base 12: mod_base = OTHER; note = 2'-O-methylguanosine-3'-phosphate
  modified_base 13: mod_base = OTHER; note = 2'-O-methyluridine-3'-phosphate
  modified_base 14: mod_base = OTHER; note = 2'-deoxy-2'-fluorocytidine-3'-phosphate
  modified_base 15: mod_base = OTHER; note = 2'-O-methylcytidine-3'-phosphate
  modified_base 16: mod_base = OTHER; note = 2'-deoxy-2'-fluorocytidine-3'-phosphate
  modified_base 17: mod_base = OTHER; note = 2'-O-methyluridine-3'-phosphate
  modified_base 18: mod_base = OTHER; note = 2'-O-methyluridine-3'-phosphate
  modified_base 19: mod_base = OTHER; note = 2'-O-methyluridine-3'-phosphorothioate
  modified_base 20: mod_base = OTHER; note = 2'-O-methyluridine-3'-phosphorothioate
  modified_base 21: mod_base = OTHER; note = 2'-O-methylguanosine
  misc_feature 1..4: note = RNA
  misc_feature 6..21: note = RNA
  misc_feature 5: note = DNA
atgagaatactgtcccttttg

SEQ ID NO: 858 - DNA, 21 bp, synthetic construct
  source 1..21: mol_type = other DNA
  modified_base 1: mod_base = OTHER; note = 2'-O-methyluridine-3'-phosphorothioate
  modified_base 2: mod_base = OTHER; note = 2'-O-methyladenosine-3'-phosphorothioate
  modified_base 3: mod_base = OTHER; note = 2'-O-methyladenosine-3'-phosphate
  modified_base 4: mod_base = OTHER; note = 2'-O-methyladenosine-3'-phosphate
  modified_base 5: mod_base = OTHER; note = 2'-O-methyladenosine-3'-phosphate
  modified_base 6: mod_base = OTHER; note = 2'-O-methylguanosine-3'-phosphate
  modified_base 7: mod_base = OTHER; note = 2'-O-methylguanosine-3'-phosphate
  modified_base 8: mod_base = OTHER; note = 2'-O-methylguanosine-3'-phosphate
  modified_base 10: mod_base = OTHER; note = 2'-O-methylcytidine-3'-phosphate
  modified_base 12: mod_base = OTHER; note = 2'-O-methylguanosine-3'-phosphate
  modified_base 13: mod_base = OTHER; note = 2'-O-methyluridine-3'-phosphate
  modified_base 14: mod_base = OTHER; note = 2'-O-methyladenosine-3'-phosphate
  modified_base 15: mod_base = OTHER; note = 2'-O-methyluridine-3'-phosphate
  modified_base 16: mod_base = OTHER; note = 2'-O-methyluridine-3'-phosphate
  modified_base 17: mod_base = OTHER; note = 2'-O-methylcytidine-3'-phosphate
  modified_base 18: mod_base = OTHER; note = 2'-O-methyluridine-3'-phosphate
  modified_base 19: mod_base = OTHER; note = 2'-O-methylcytidine-3'-phosphate
  modified_base 20: mod_base = OTHER; note = 2'-O-methyladenosine-3'-phosphate
  modified_base 21: mod_base = OTHER; note = 2'-O-methyluridine-3'-phosphate ((2S,4R)-1-[29-[[2-(acetylamino)-2-deoxy-beta-D-galactopyra nosyl]oxy]-14,14-bis[[3-[[3-[[5-[[2-(acetylamino)-2-deoxy-b eta-D-galactopyranosyl]oxy]-1-oxopentyl]amino]propyl]amino] -3-oxopropoxy]methyl]-1,12,19,25-tetraoxo-16-oxa-13,20,24-t riazanonacos-1-yl]-4-hydroxy-2-pyrrolidinyl)methyl ester
  misc_feature 1..8: note = RNA
  misc_feature 10: note = RNA
  misc_feature 12..21: note = RNA
  misc_feature 9: note = DNA
  misc_feature 11: note = DNA
taaaagggacagtattctcat

SEQ ID NO: 859 - DNA, 21 bp, synthetic construct
  source 1..21: mol_type = other DNA
  modified_base 1: mod_base = OTHER; note = 2'-O-methyladenosine-3'-phosphorothioate
  modified_base 2: mod_base = OTHER; note = 2'-O-methyladenosine-3'-phosphorothioate
  modified_base 3: mod_base = OTHER; note = 2'-O-methyladenosine-3'-phosphate
  modified_base 4: mod_base = OTHER; note = 2'-O-methyladenosine-3'-phosphate
  modified_base 5: mod_base = OTHER; note = 2'-O-methyladenosine-3'-phosphate
  modified_base 6: mod_base = OTHER; note = 2'-O-methylguanosine-3'-phosphate
  modified_base 7: mod_base = OTHER; note = 2'-O-methylguanosine-3'-phosphate
  modified_base 8: mod_base = OTHER; note = 2'-O-methylguanosine-3'-phosphate
  modified_base 10: mod_base = OTHER; note = 2'-O-methylcytidine-3'-phosphate
  modified_base 12: mod_base = OTHER; note = 2'-O-methylguanosine-3'-phosphate
  modified_base 13: mod_base = OTHER; note = 2'-O-methyluridine-3'-phosphate
  modified_base 14: mod_base = OTHER; note = 2'-O-methyladenosine-3'-phosphate
  modified_base 15: mod_base = OTHER; note = 2'-O-methyluridine-3'-phosphate
  modified_base 16: mod_base = OTHER; note = 2'-O-methyluridine-3'-phosphate
  modified_base 17: mod_base = OTHER; note = 2'-O-methylcytidine-3'-phosphate
  modified_base 18: mod_base = OTHER; note = 2'-O-methyluridine-3'-phosphate
  modified_base 19: mod_base = OTHER; note = 2'-O-methylcytidine-3'-phosphate
  modified_base 20: mod_base = OTHER; note = 2'-O-methyladenosine-3'-phosphate
  modified_base 21: mod_base = OTHER; note = 2'-O-methyluridine-3'-phosphate ((2S,4R)-1-[29-[[2-(acetylamino)-2-deoxy-beta-D-galactopyra nosyl]oxy]-14,14-bis[[3-[[3-[[5-[[2-(acetylamino)-2-deoxy-b eta-D-galactopyranosyl]oxy]-1-oxopentyl]amino]propyl]amino] -3-oxopropoxy]methyl]-1,12,19,25-tetraoxo-16-oxa-13,20,24-t riazanonacos-1-yl]-4-hydroxy-2-pyrrolidinyl)methyl ester
  misc_feature 1..8: note = RNA
  misc_feature 10: note = RNA
  misc_feature 12..21: note = RNA
  misc_feature 9: note = DNA
  misc_feature 11: note = DNA
aaaaagggacagtattctcat

SEQ ID NO: 860 - DNA, 23 bp, synthetic construct
  source 1..23: mol_type = other DNA
  modified_base 1: mod_base = OTHER; note = 2'-O-methyladenosine-3'-phosphorothioate
  modified_base 2: mod_base = OTHER; note = 2'-deoxy-2'-fluorouridine-3'-phosphorothioate
  modified_base 3: mod_base = OTHER; note = 2'-O-methylguanosine-3'-phosphate
  modified_base 4: mod_base = OTHER; note = 2'-O-methyladenosine-3'-phosphate
  modified_base 6: mod_base = OTHER; note = 2'-O-methyladenosine-3'-phosphate
  modified_base 7: mod_base = OTHER; note = Adenosine-glycol nucleic acid (GNA), S-isomer
  modified_base 8: mod_base = OTHER; note = 2'-O-methyluridine-3'-phosphate
  modified_base 9: mod_base = OTHER; note = 2'-O-methyladenosine-3'-phosphate
  modified_base 10: mod_base = OTHER; note = 2'-O-methylcytidine-3'-phosphate
  modified_base 11: mod_base = OTHER; note = 2'-O-methyluridine-3'-phosphate
  modified_base 12: mod_base = OTHER; note = 2'-O-methylguanosine-3'-phosphate
  modified_base 13: mod_base = OTHER; note = 2'-O-methyluridine-3'-phosphate
  modified_base 14: mod_base = OTHER; note = 2'-deoxy-2'-fluorocytidine-3'-phosphate
  modified_base 15: mod_base = OTHER; note = 2'-O-methylcytidine-3'-phosphate
  modified_base 16: mod_base = OTHER; note = 2'-deoxy-2'-fluorocytidine-3'-phosphate
  modified_base 17: mod_base = OTHER; note = 2'-O-methyluridine-3'-phosphate
  modified_base 18: mod_base = OTHER; note = 2'-O-methyluridine-3'-phosphate
  modified_base 19: mod_base = OTHER; note = 2'-O-methyluridine-3'-phosphate
  modified_base 20: mod_base = OTHER; note = 2'-O-methyluridine-3'-phosphate
  modified_base 21: mod_base = OTHER; note = 2'-O-methylguanosine-3'-phosphorothioate
  modified_base 22: mod_base = OTHER; note = 2'-O-methylcytidine-3'-phosphorothioate
  modified_base 23: mod_base = OTHER; note = 2'-O-methylcytidine
  misc_feature 1..4: note = RNA
  misc_feature 6..23: note = RNA
  misc_feature 5: note = DNA
atgagaatactgtcccttttgcc

SEQ ID NO: 861 - DNA, 21 bp, synthetic construct
  source 1..21: mol_type = other DNA
  modified_base 1: mod_base = OTHER; note = 2'-O-methyluridine-3'-phosphorothioate
  modified_base 2: mod_base = OTHER; note = 2'-O-methyladenosine-3'-phosphorothioate
  modified_base 3: mod_base = OTHER; note = 2'-O-methyladenosine-3'-phosphate
  modified_base 4: mod_base = OTHER; note = 2'-O-methyladenosine-3'-phosphate
  modified_base 5: mod_base = OTHER; note = 2'-O-methyladenosine-3'-phosphate
  modified_base 6: mod_base = OTHER; note = 2'-O-methylguanosine-3'-phosphate
  modified_base 7: mod_base = OTHER; note = 2'-O-methylguanosine-3'-phosphate
  modified_base 8: mod_base = OTHER; note = 2'-O-methylguanosine-3'-phosphate
  modified_base 10: mod_base = OTHER; note = 2'-O-methylcytidine-3'-phosphate
  modified_base 12: mod_base = OTHER; note = 2'-O-methylguanosine-3'-phosphate
  modified_base 14: mod_base = OTHER; note = 2'-O-methyladenosine-3'-phosphate
  modified_base 15: mod_base = OTHER; note = 2'-O-methyluridine-3'-phosphate
  modified_base 16: mod_base = OTHER; note = 2'-O-methyluridine-3'-phosphate
  modified_base 17: mod_base = OTHER; note = 2'-O-methylcytidine-3'-phosphate
  modified_base 18: mod_base = OTHER; note = 2'-O-methyluridine-3'-phosphate
  modified_base 19: mod_base = OTHER; note = 2'-O-methylcytidine-3'-phosphate
  modified_base 20: mod_base = OTHER; note = 2'-O-methyladenosine-3'-phosphate
  modified_base 21: mod_base = OTHER; note = 2'-O-methyluridine-3'-phosphate ((2S,4R)-1-[29-[[2-(acetylamino)-2-deoxy-beta-D-galactopyra nosyl]oxy]-14,14-bis[[3-[[3-[[5-[[2-(acetylamino)-2-deoxy-b eta-D-galactopyranosyl]oxy]-1-oxopentyl]amino]propyl]amino] -3-oxopropoxy]methyl]-1,12,19,25-tetraoxo-16-oxa-13,20,24-t riazanonacos-1-yl]-4-hydroxy-2-pyrrolidinyl)methyl ester
  misc_feature 1..8: note = RNA
  misc_feature 10: note = RNA
  misc_feature 12: note = RNA
  misc_feature 14..21: note = RNA
  misc_feature 9: note = DNA
  misc_feature 11: note = DNA
  misc_feature 13: note = DNA
taaaagggacagtattctcat

SEQ ID NO: 862 - DNA, 23 bp, synthetic construct
  source 1..23: mol_type = other DNA
  modified_base 1: mod_base = OTHER; note = 2'-O-methyladenosine-3'-phosphorothioate
  modified_base 2: mod_base = OTHER; note = 2'-deoxy-2'-fluorouridine-3'-phosphorothioate
  modified_base 3: mod_base = OTHER; note = 2'-O-methylguanosine-3'-phosphate
  modified_base 4: mod_base = OTHER; note = 2'-O-methyladenosine-3'-phosphate
  modified_base 6: mod_base = OTHER; note = 2'-O-methyladenosine-3'-phosphate
  modified_base 8: mod_base = OTHER; note = 2'-O-methyluridine-3'-phosphate
  modified_base 9: mod_base = OTHER; note = 2'-O-methyladenosine-3'-phosphate
  modified_base 10: mod_base = OTHER; note = 2'-O-methylcytidine-3'-phosphate
  modified_base 11: mod_base = OTHER; note = 2'-O-methyluridine-3'-phosphate
  modified_base 12: mod_base = OTHER; note = 2'-O-methylguanosine-3'-phosphate
  modified_base 13: mod_base = OTHER; note = 2'-O-methyluridine-3'-phosphate
  modified_base 14: mod_base = OTHER; note = 2'-deoxy-2'-fluorocytidine-3'-phosphate
  modified_base 15: mod_base = OTHER; note = 2'-O-methylcytidine-3'-phosphate
  modified_base 16: mod_base = OTHER; note = 2'-deoxy-2'-fluorocytidine-3'-phosphate
  modified_base 17: mod_base = OTHER; note = 2'-O-methyluridine-3'-phosphate
  modified_base 18: mod_base = OTHER; note = 2'-O-methyluridine-3'-phosphate
  modified_base 19: mod_base = OTHER; note = 2'-O-methyluridine-3'-phosphate
  modified_base 20: mod_base = OTHER; note = 2'-O-methyluridine-3'-phosphate
  modified_base 21: mod_base = OTHER; note = 2'-O-methyladenosine-3'-phosphorothioate
  modified_base 22: mod_base = OTHER; note = 2'-O-methyladenosine-3'-phosphorothioate
  modified_base 23: mod_base = OTHER; note = 2'-O-methylguanosine
  misc_feature 1..4: note = RNA
  misc_feature 6: note = RNA
  misc_feature 8..23: note = RNA
  misc_feature 5: note = DNA
  misc_feature 7: note = DNA
atgagaatactgtcccttttaag

SEQ ID NO: 863 - RNA, 23 nt, synthetic construct
  source 1..23: mol_type = other RNA
  modified_base 1: mod_base = OTHER; note = 2'-O-methyladenosine-3'-phosphorothioate
  modified_base 2: mod_base = OTHER; note = 2'-deoxy-2'-fluoroadenosine-3'-phosphorothioate
  modified_base 3: mod_base = OTHER; note = 2'-O-methylguanosine-3'-phosphate
  modified_base 4: mod_base = OTHER; note = 2'-O-methyladenosine-3'-phosphate
  modified_base 5: mod_base = OTHER; note = 2'-O-methyladenosine-3'-phosphate
  modified_base 6: mod_base = OTHER; note = 2'-deoxy-2'-fluorouridine-3'-phosphate
  modified_base 7: mod_base = OTHER; note = 2'-O-methyladenosine-3'-phosphate
  modified_base 8: mod_base = OTHER; note = 2'-O-methylcytidine-3'-phosphate
  modified_base 9: mod_base = OTHER; note = 2'-O-methyluridine-3'-phosphate
  modified_base 10: mod_base = OTHER; note = 2'-O-methylguanosine-3'-phosphate
  modified_base 11: mod_base = OTHER; note = 2'-O-methyluridine-3'-phosphate
  modified_base 12: mod_base = OTHER; note = 2'-O-methylcytidine-3'-phosphate
  modified_base 13: mod_base = OTHER; note = 2'-O-methylcytidine-3'-phosphate
  modified_base 14: mod_base = OTHER; note = 2'-deoxy-2'-fluorocytidine-3'-phosphate
  modified_base 15: mod_base = OTHER; note = 2'-O-methyluridine-3'-phosphate
  modified_base 16: mod_base = OTHER; note = 2'-deoxy-2'-fluorouridine-3'-phosphate
  modified_base 17: mod_base = OTHER; note = 2'-O-methyluridine-3'-phosphate
  modified_base 18: mod_base = OTHER; note = 2'-O-methyluridine-3'-phosphate
  modified_base 19: mod_base = OTHER; note = 2'-O-methyladenosine-3'-phosphate
  modified_base 20: mod_base = OTHER; note = 2'-O-methyladenosine-3'-phosphate
  modified_base 21: mod_base = OTHER; note = 2'-O-methylguanosine-3'-phosphorothioate
  modified_base 22: mod_base = OTHER; note = 2'-O-methylcytidine-3'-phosphorothioate
  modified_base 23: mod_base = OTHER; note = 2'-O-methyladenosine
aagaatactgtcccttttaagca

SEQ ID NO: 864 - DNA, 23 bp, synthetic construct
  source 1..23: mol_type = other DNA
  modified_base 1: mod_base = OTHER; note = 2'-O-methyladenosine-3'-phosphorothioate
  modified_base 2: mod_base = OTHER; note = 2'-deoxyadenosine-3'-phosphorothioate
  modified_base 3: mod_base = OTHER; note = 2'-O-methylguanosine-3'-phosphate
  modified_base 4: mod_base = OTHER; note = 2'-O-methyladenosine-3'-phosphate
  modified_base 5: mod_base = OTHER; note = 2'-O-methyladenosine-3'-phosphate
  modified_base 6: mod_base = OTHER; note = 2'-deoxy-2'-fluorouridine-3'-phosphate
  modified_base 7: mod_base = OTHER; note = 2'-O-methyladenosine-3'-phosphate
  modified_base 8: mod_base = OTHER; note = 2'-O-methylcytidine-3'-phosphate
  modified_base 9: mod_base = OTHER; note = 2'-O-methyluridine-3'-phosphate
  modified_base 10: mod_base = OTHER; note = 2'-O-methylguanosine-3'-phosphate
  modified_base 11: mod_base = OTHER; note = 2'-O-methyluridine-3'-phosphate
  modified_base 12: mod_base = OTHER; note = 2'-O-methylcytidine-3'-phosphate
  modified_base 13: mod_base = OTHER; note = 2'-O-methylcytidine-3'-phosphate
  modified_base 14: mod_base = OTHER; note = 2'-deoxy-2'-fluorocytidine-3'-phosphate
  modified_base 15: mod_base = OTHER; note = 2'-O-methyluridine-3'-phosphate
  modified_base 16: mod_base = OTHER; note = 2'-deoxy-2'-fluorouridine-3'-phosphate
  modified_base 17: mod_base = OTHER; note = 2'-O-methyluridine-3'-phosphate
  modified_base 18: mod_base = OTHER; note = 2'-O-methyluridine-3'-phosphate
  modified_base 19: mod_base = OTHER; note = 2'-O-methyladenosine-3'-phosphate
  modified_base 20: mod_base = OTHER; note = 2'-O-methyladenosine-3'-phosphate
  modified_base 21: mod_base = OTHER; note = 2'-O-methylguanosine-3'-phosphorothioate
  modified_base 22: mod_base = OTHER; note = 2'-O-methylcytidine-3'-phosphorothioate
  modified_base 23: mod_base = OTHER; note = 2'-O-methyladenosine
  misc_feature 1: note = RNA
  misc_feature 3..23: note = RNA
  misc_feature 2: note = DNA
aagaatactgtcccttttaagca

SEQ ID NO: 865 - DNA, 23 bp, synthetic construct
  source 1..23: mol_type = other DNA
  modified_base 1: mod_base = OTHER; note = 2'-O-methyladenosine-3'-phosphorothioate
  modified_base 2: mod_base = OTHER; note = 2'-deoxyadenosine-3'-phosphorothioate
  modified_base 3: mod_base = OTHER; note = 2'-O-methylguanosine-3'-phosphate
  modified_base 4: mod_base = OTHER; note = 2'-O-methyladenosine-3'-phosphate
  modified_base 5: mod_base = OTHER; note = 2'-O-methyladenosine-3'-phosphate
  modified_base 6: mod_base = OTHER; note = 2'-deoxy-2'-fluorouridine-3'-phosphate
  modified_base 7: mod_base = OTHER; note = 2'-O-methyladenosine-3'-phosphate
  modified_base 8: mod_base = OTHER; note = 2'-O-methylcytidine-3'-phosphate
  modified_base 9: mod_base = OTHER; note = 2'-O-methyluridine-3'-phosphate
  modified_base 10: mod_base = OTHER; note = 2'-O-methylguanosine-3'-phosphate
  modified_base 11: mod_base = OTHER; note = 2'-O-methyluridine-3'-phosphate
  modified_base 12: mod_base = OTHER; note = 2'-O-methylcytidine-3'-phosphate
  modified_base 13: mod_base = OTHER; note = 2'-O-methylcytidine-3'-phosphate
  modified_base 14: mod_base = OTHER; note = 2'-deoxy-2'-fluorocytidine-3'-phosphate
  modified_base 15: mod_base = OTHER; note = 2'-O-methyluridine-3'-phosphate
  modified_base 16: mod_base = OTHER; note = 2'-deoxy-2'-fluorouridine-3'-phosphate
  modified_base 17: mod_base = OTHER; note = 2'-O-methyluridine-3'-phosphate
  modified_base 18: mod_base = OTHER; note = 2'-O-methyluridine-3'-phosphate
  modified_base 19: mod_base = OTHER; note = 2'-O-methyladenosine-3'-phosphate
  modified_base 20: mod_base = OTHER; note = 2'-O-methyladenosine-3'-phosphate
  modified_base 21: mod_base = OTHER; note = 2'-O-methylguanosine-3'-phosphorothioate
  modified_base 22: mod_base = OTHER; note = 2'-O-methylcytidine-3'-phosphorothioate
  modified_base 23: mod_base = OTHER; note = 2'-O-methylcytidine
  misc_feature 1: note = RNA
  misc_feature 3..23: note = RNA
  misc_feature 2: note = DNA
aagaatactgtcccttttaagcc

SEQ ID NO: 866 - DNA, 23 bp, synthetic construct
  source 1..23: mol_type = other DNA
  modified_base 1: mod_base = OTHER; note = 2'-O-methyladenosine-3'-phosphorothioate
  modified_base 2: mod_base = OTHER; note = 2'-deoxyadenosine-3'-phosphorothioate
  modified_base 3: mod_base = OTHER; note = 2'-O-methylguanosine-3'-phosphate
  modified_base 4: mod_base = OTHER; note = 2'-O-methyladenosine-3'-phosphate
  modified_base 6: mod_base = OTHER; note = 2'-O-methyluridine-3'-phosphate
  modified_base 8: mod_base = OTHER; note = 2'-O-methylcytidine-3'-phosphate
  modified_base 9: mod_base = OTHER; note = 2'-O-methyluridine-3'-phosphate
  modified_base 10: mod_base = OTHER; note = 2'-O-methylguanosine-3'-phosphate
  modified_base 11: mod_base = OTHER; note = 2'-O-methyluridine-3'-phosphate
  modified_base 12: mod_base = OTHER; note = 2'-O-methylcytidine-3'-phosphate
  modified_base 13: mod_base = OTHER; note = 2'-O-methylcytidine-3'-phosphate
  modified_base 14: mod_base = OTHER; note = 2'-deoxy-2'-fluorocytidine-3'-phosphate
  modified_base 15: mod_base = OTHER; note = 2'-O-methyluridine-3'-phosphate
  modified_base 16: mod_base = OTHER; note = 2'-deoxy-2'-fluorouridine-3'-phosphate
  modified_base 17: mod_base = OTHER; note = 2'-O-methyluridine-3'-phosphate
  modified_base 18: mod_base = OTHER; note = 2'-O-methyluridine-3'-phosphate
  modified_base 19: mod_base = OTHER; note = 2'-O-methyladenosine-3'-phosphate
  modified_base 20: mod_base = OTHER; note = 2'-O-methyladenosine-3'-phosphate
  modified_base 21: mod_base = OTHER; note = 2'-O-methylguanosine-3'-phosphorothioate
  modified_base 22: mod_base = OTHER; note = 2'-O-methylcytidine-3'-phosphorothioate
  modified_base 23: mod_base = OTHER; note = 2'-O-methylcytidine
  misc_feature 1: note = RNA
  misc_feature 3..4: note = RNA
  misc_feature 6: note = RNA
  misc_feature 8..23: note = RNA
  misc_feature 2: note = DNA
  misc_feature 5: note = DNA
  misc_feature 7: note = DNA
aagaatactgtcccttttaagcc

SEQ ID NO: 867 - RNA, 19 nt, synthetic construct
  source 1..19: mol_type = other RNA
  modified_base 1: mod_base = OTHER; note = 2'-O-methyluridine-3'-phosphorothioate
  modified_base 2: mod_base = OTHER; note = 2'-O-methyladenosine-3'-phosphorothioate
  modified_base 3: mod_base = OTHER; note = 2'-O-methyladenosine-3'-phosphate
  modified_base 4: mod_base = OTHER; note = 2'-O-methyladenosine-3'-phosphate
  modified_base 5: mod_base = OTHER; note = 2'-deoxy-2'-fluoroadenosine-3'-phosphate
  modified_base 6: mod_base = OTHER; note = 2'-O-methylguanosine-3'-phosphate
  modified_base 7: mod_base = OTHER; note = 2'-deoxy-2'-fluoroguanosine-3'-phosphate
  modified_base 8: mod_base = OTHER; note = 2'-deoxy-2'-fluoroguanosine-3'-phosphate
  modified_base 9: mod_base = OTHER; note = 2'-deoxy-2'-fluoroadenosine-3'-phosphate
  modified_base 10: mod_base = OTHER; note = 2'-O-methylcytidine-3'-phosphate
  modified_base 11: mod_base = OTHER; note = 2'-O-methyladenosine-3'-phosphate
  modified_base 12: mod_base = OTHER; note = 2'-O-methylguanosine-3'-phosphate
  modified_base 13: mod_base = OTHER; note = 2'-O-methyluridine-3'-phosphate
  modified_base 14: mod_base = OTHER; note = 2'-O-methyladenosine-3'-phosphate
  modified_base 15: mod_base = OTHER; note = 2'-O-methyluridine-3'-phosphate
  modified_base 16: mod_base = OTHER; note = 2'-O-methyluridine-3'-phosphate
  modified_base 17: mod_base = OTHER; note = 2'-O-methylcytidine-3'-phosphate
  modified_base 18: mod_base = OTHER; note = 2'-O-methyluridine-3'-phosphate
  modified_base 19: mod_base = OTHER; note = 2'-O-methyluridine-3'-phosphate ((2S,4R)-1-[29-[[2-(acetylamino)-2-deoxy-beta-D-galactopyra nosyl]oxy]-14,14-bis[[3-[[3-[[5-[[2-(acetylamino)-2-deoxy-b eta-D-galactopyranosyl]oxy]-1-oxopentyl]amino]propyl]amino] -3-oxopropoxy]methyl]-1,12,19,25-tetraoxo-16-oxa-13,20,24-t riazanonacos-1-yl]-4-hydroxy-2-pyrrolidinyl)methyl ester
taaaagggacagtattctt

SEQ ID NO: 868 - DNA, 21 bp, synthetic construct
  source 1..21: mol_type = other DNA
  modified_base 1: mod_base = OTHER; note = 2'-O-methyladenosine-3'-phosphorothioate
  modified_base 2: mod_base = OTHER; note = 2'-deoxyadenosine-3'-phosphorothioate
  modified_base 3: mod_base = OTHER; note = 2'-O-methylguanosine-3'-phosphate
  modified_base 4: mod_base = OTHER; note = 2'-O-methyladenosine-3'-phosphate
  modified_base 5: mod_base = OTHER; note = 2'-O-methyladenosine-3'-phosphate
  modified_base 6: mod_base = OTHER; note = 2'-deoxy-2'-fluorouridine-3'-phosphate
  modified_base 7: mod_base = OTHER; note = 2'-O-methyladenosine-3'-phosphate
  modified_base 8: mod_base = OTHER; note = 2'-O-methylcytidine-3'-phosphate
  modified_base 9: mod_base = OTHER; note = 2'-O-methyluridine-3'-phosphate
  modified_base 10: mod_base = OTHER; note = 2'-O-methylguanosine-3'-phosphate
  modified_base 11: mod_base = OTHER; note = 2'-O-methyluridine-3'-phosphate
  modified_base 12: mod_base = OTHER; note = 2'-O-methylcytidine-3'-phosphate
  modified_base 13: mod_base = OTHER; note = 2'-O-methylcytidine-3'-phosphate
  modified_base 14: mod_base = OTHER; note = 2'-deoxy-2'-fluorocytidine-3'-phosphate
  modified_base 15: mod_base = OTHER; note = 2'-O-methyluridine-3'-phosphate
  modified_base 16: mod_base = OTHER; note = 2'-deoxy-2'-fluorouridine-3'-phosphate
  modified_base 17: mod_base = OTHER; note = 2'-O-methyluridine-3'-phosphate
  modified_base 18: mod_base = OTHER; note = 2'-O-methyluridine-3'-phosphate
  modified_base 19: mod_base = OTHER; note = 2'-O-methyladenosine-3'-phosphorothioate
  modified_base 20: mod_base = OTHER; note = 2'-O-methyladenosine-3'-phosphorothioate
  modified_base 21: mod_base = OTHER; note = 2'-O-methylguanosine
  misc_feature 1: note = RNA
  misc_feature 3..21: note = RNA
  misc_feature 2: note = DNA
aagaatactgtcccttttaag

SEQ ID NO: 869 - DNA, 21 bp, synthetic construct
  source 1..21: mol_type = other DNA
  modified_base 1: mod_base = OTHER; note = 2'-O-methyladenosine-3'-phosphorothioate
  modified_base 2: mod_base = OTHER; note = 2'-deoxyadenosine-3'-phosphorothioate
  modified_base 3: mod_base = OTHER; note = 2'-O-methylguanosine-3'-phosphate
  modified_base 4: mod_base = OTHER; note = 2'-O-methyladenosine-3'-phosphate
  modified_base 6: mod_base = OTHER; note = 2'-O-methyluridine-3'-phosphate
  modified_base 8: mod_base = OTHER; note = 2'-O-methylcytidine-3'-phosphate
  modified_base 9: mod_base = OTHER; note = 2'-O-methyluridine-3'-phosphate
  modified_base 10: mod_base = OTHER; note = 2'-O-methylguanosine-3'-phosphate
  modified_base 11: mod_base = OTHER; note = 2'-O-methyluridine-3'-phosphate
  modified_base 12: mod_base = OTHER; note = 2'-O-methylcytidine-3'-phosphate
  modified_base 13: mod_base = OTHER; note = 2'-O-methylcytidine-3'-phosphate
  modified_base 14: mod_base = OTHER; note = 2'-deoxy-2'-fluorocytidine-3'-phosphate
  modified_base 15: mod_base = OTHER; note = 2'-O-methyluridine-3'-phosphate
  modified_base 16: mod_base = OTHER; note = 2'-deoxy-2'-fluorouridine-3'-phosphate
  modified_base 17: mod_base = OTHER; note = 2'-O-methyluridine-3'-phosphate
  modified_base 18: mod_base = OTHER; note = 2'-O-methyluridine-3'-phosphate
  modified_base 19: mod_base = OTHER; note = 2'-O-methyladenosine-3'-phosphorothioate
  modified_base 20: mod_base = OTHER; note = 2'-O-methyladenosine-3'-phosphorothioate
  modified_base 21: mod_base = OTHER; note = 2'-O-methylguanosine
  misc_feature 1: note = RNA
  misc_feature 3..4: note = RNA
  misc_feature 6: note = RNA
  misc_feature 8..21: note = RNA
  misc_feature 2: note = DNA
  misc_feature 5: note = DNA
  misc_feature 7: note = DNA
aagaatactgtcccttttaag

SEQ ID NO: 870 - DNA, 21 bp, synthetic construct
  source 1..21: mol_type = other DNA
  modified_base 1: mod_base = OTHER; note = 2'-O-methylcytidine-3'-phosphorothioate
  modified_base 2: mod_base = OTHER; note = 2'-O-methyluridine-3'-phosphorothioate
  modified_base 3: mod_base = OTHER; note = 2'-O-methyluridine-3'-phosphate
  modified_base 4: mod_base = OTHER; note = 2'-O-methyladenosine-3'-phosphate
  modified_base 5: mod_base = OTHER; note = 2'-O-methyladenosine-3'-phosphate
  modified_base 6: mod_base = OTHER; note = 2'-O-methyladenosine-3'-phosphate
  modified_base 7: mod_base = OTHER; note = 2'-O-methyladenosine-3'-phosphate
  modified_base 8: mod_base = OTHER; note = 2'-O-methylguanosine-3'-phosphate
  modified_base 10: mod_base = OTHER; note = 2'-O-methylguanosine-3'-phosphate
  modified_base 12: mod_base = OTHER; note = 2'-O-methylcytidine-3'-phosphate
  modified_base 13: mod_base = OTHER; note = 2'-O-methyladenosine-3'-phosphate
  modified_base 14: mod_base = OTHER; note = 2'-O-methylguanosine-3'-phosphate
  modified_base 15: mod_base = OTHER; note = 2'-O-methyluridine-3'-phosphate
  modified_base 16: mod_base = OTHER; note = 2'-O-methyladenosine-3'-phosphate
  modified_base 17: mod_base = OTHER; note = 2'-O-methyluridine-3'-phosphate
  modified_base 18: mod_base = OTHER; note = 2'-O-methyluridine-3'-phosphate
  modified_base 19: mod_base = OTHER; note = 2'-O-methylcytidine-3'-phosphate
  modified_base 20: mod_base = OTHER; note = 2'-O-methyluridine-3'-phosphate
  modified_base 21: mod_base = OTHER; note = 2'-O-methyluridine-3'-phosphate ((2S,4R)-1-[29-[[2-(acetylamino)-2-deoxy-beta-D-galactopyra nosyl]oxy]-14,14-bis[[3-[[3-[[5-[[2-(acetylamino)-2-deoxy-b eta-D-galactopyranosyl]oxy]-1-oxopentyl]amino]propyl]amino] -3-oxopropoxy]methyl]-1,12,19,25-tetraoxo-16-oxa-13,20,24-t riazanonacos-1-yl]-4-hydroxy-2-pyrrolidinyl)methyl ester
  misc_feature 1..8: note = RNA
  misc_feature 10: note = RNA
  misc_feature 12..21: note = RNA
  misc_feature 9: note = DNA
  misc_feature 11: note = DNA
cttaaaagggacagtattctt

SEQ ID NO: 871 - DNA, 21 bp, synthetic construct
  source 1..21: mol_type = other DNA
  modified_base 1: mod_base = OTHER; note = 2'-O-methylcytidine-3'-phosphorothioate
  modified_base 2: mod_base = OTHER; note = 2'-O-methyluridine-3'-phosphorothioate
  modified_base 3: mod_base = OTHER; note = 2'-O-methyluridine-3'-phosphate
  modified_base 4: mod_base = OTHER; note = 2'-O-methyladenosine-3'-phosphate
  modified_base 5: mod_base = OTHER; note = 2'-O-methyladenosine-3'-phosphate
  modified_base 6: mod_base = OTHER; note = 2'-O-methyladenosine-3'-phosphate
  modified_base 7: mod_base = OTHER; note = 2'-O-methyladenosine-3'-phosphate
  modified_base 8: mod_base = OTHER; note = 2'-O-methylguanosine-3'-phosphate
  modified_base 10: mod_base = OTHER; note = 2'-O-methylguanosine-3'-phosphate
  modified_base 12: mod_base = OTHER; note = 2'-O-methylcytidine-3'-phosphate
  modified_base 14: mod_base = OTHER; note = 2'-O-methylguanosine-3'-phosphate
  modified_base 15: mod_base = OTHER; note = 2'-O-methyluridine-3'-phosphate
  modified_base 16: mod_base = OTHER; note = 2'-O-methyladenosine-3'-phosphate
  modified_base 17: mod_base = OTHER; note = 2'-O-methyluridine-3'-phosphate
  modified_base 18: mod_base = OTHER; note = 2'-O-methyluridine-3'-phosphate
  modified_base 19: mod_base = OTHER; note = 2'-O-methylcytidine-3'-phosphate
  modified_base 20: mod_base = OTHER; note = 2'-O-methyluridine-3'-phosphate
  modified_base 21: mod_base = OTHER; note = 2'-O-methyluridine-3'-phosphate ((2S,4R)-1-[29-[[2-(acetylamino)-2-deoxy-beta-D-galactopyra nosyl]oxy]-14,14-bis[[3-[[3-[[5-[[2-(acetylamino)-2-deoxy-b eta-D-galactopyranosyl]oxy]-1-oxopentyl]amino]propyl]amino] -3-oxopropoxy]methyl]-1,12,19,25-tetraoxo-16-oxa-13,20,24-t riazanonacos-1-yl]-4-hydroxy-2-pyrrolidinyl)methyl ester
  misc_feature 1..8: note = RNA
  misc_feature 10: note = RNA
  misc_feature 12: note = RNA
  misc_feature 14..21: note = RNA
  misc_feature 9: note = DNA
  misc_feature 11: note = DNA
  misc_feature 13: note = DNA
cttaaaagggacagtattctt

SEQ ID NO: 872 - RNA, 23 nt, synthetic construct
  source 1..23: mol_type = other RNA
  modified_base 1: mod_base = OTHER; note = 2'-O-methyladenosine-3'-phosphorothioate
  modified_base 2: mod_base = OTHER; note = 2'-deoxy-2'-fluorocytidine-3'-phosphorothioate
  modified_base 3: mod_base = OTHER; note = 2'-O-methyluridine-3'-phosphate
  modified_base 4: mod_base = OTHER; note = 2'-O-methylguanosine-3'-phosphate
  modified_base 5: mod_base = OTHER; note = 2'-O-methyladenosine-3'-phosphate
  modified_base 6: mod_base = OTHER; note = 2'-deoxy-2'-fluoroguanosine-3'-phosphate
  modified_base 7: mod_base = OTHER; note = 2'-O-methyladenosine-3'-phosphate
  modified_base 8: mod_base = OTHER; note = 2'-O-methyladenosine-3'-phosphate
  modified_base 9: mod_base = OTHER; note = 2'-O-methyluridine-3'-phosphate
  modified_base 10: mod_base = OTHER; note = 2'-O-methyladenosine-3'-phosphate
  modified_base 11: mod_base = OTHER; note = 2'-O-methylcytidine-3'-phosphate
  modified_base 12: mod_base = OTHER; note = 2'-O-methyluridine-3'-phosphate
  modified_base 13: mod_base = OTHER; note = 2'-O-methylguanosine-3'-phosphate
  modified_base 14: mod_base = OTHER; note = 2'-deoxy-2'-fluorouridine-3'-phosphate
  modified_base 15: mod_base = OTHER; note = 2'-O-methylcytidine-3'-phosphate
  modified_base 16: mod_base = OTHER; note = 2'-deoxy-2'-fluorocytidine-3'-phosphate
  modified_base 17: mod_base = OTHER; note = 2'-O-methylcytidine-3'-phosphate
  modified_base 18: mod_base = OTHER; note = 2'-O-methyluridine-3'-phosphate
  modified_base 19: mod_base = OTHER; note = 2'-O-methyluridine-3'-phosphate
  modified_base 20: mod_base = OTHER; note = 2'-O-methyluridine-3'-phosphate
  modified_base 21: mod_base = OTHER; note = 2'-O-methyluridine-3'-phosphorothioate
  modified_base 22: mod_base = OTHER; note = 2'-O-methyladenosine-3'-phosphorothioate
  modified_base 23: mod_base = OTHER; note = 2'-O-methyladenosine
actgagaatactgtcccttttaa

SEQ ID NO: 873 - DNA, 23 bp, synthetic construct
  source 1..23: mol_type = other DNA
  modified_base 1: mod_base = OTHER; note = 2'-O-methyladenosine-3'-phosphorothioate
  modified_base 2: mod_base = OTHER; note = 2'-deoxy-2'-fluorocytidine-3'-phosphorothioate
  modified_base 3: mod_base = OTHER; note = 2'-O-methyluridine-3'-phosphate
  modified_base 4: mod_base = OTHER; note = 2'-O-methylguanosine-3'-phosphate
  modified_base 6: mod_base = OTHER; note = 2'-O-methylguanosine-3'-phosphate
  modified_base 8: mod_base = OTHER; note = 2'-O-methyladenosine-3'-phosphate
  modified_base 9: mod_base = OTHER; note = 2'-O-methyluridine-3'-phosphate
  modified_base 10: mod_base = OTHER; note = 2'-O-methyladenosine-3'-phosphate
  modified_base 11: mod_base = OTHER; note = 2'-O-methylcytidine-3'-phosphate
  modified_base 12: mod_base = OTHER; note = 2'-O-methyluridine-3'-phosphate
  modified_base 13: mod_base = OTHER; note = 2'-O-methylguanosine-3'-phosphate
  modified_base 14: mod_base = OTHER; note = 2'-deoxy-2'-fluorouridine-3'-phosphate
  modified_base 15: mod_base = OTHER; note = 2'-O-methylcytidine-3'-phosphate
  modified_base 16: mod_base = OTHER; note = 2'-deoxy-2'-fluorocytidine-3'-phosphate
  modified_base 17: mod_base = OTHER; note = 2'-O-methylcytidine-3'-phosphate
  modified_base 18: mod_base = OTHER; note = 2'-O-methyluridine-3'-phosphate
  modified_base 19: mod_base = OTHER; note = 2'-O-methyluridine-3'-phosphate
  modified_base 20: mod_base = OTHER; note = 2'-O-methyluridine-3'-phosphate
  modified_base 21: mod_base = OTHER; note = 2'-O-methyluridine-3'-phosphorothioate
  modified_base 22: mod_base = OTHER; note = 2'-O-methyladenosine-3'-phosphorothioate
  modified_base 23: mod_base = OTHER; note = 2'-O-methyladenosine
  misc_feature 1..4: note = RNA
  misc_feature 6: note = RNA
  misc_feature 8..23: note = RNA
  misc_feature 5: note = DNA
  misc_feature 7: note = DNA
actgagaatactgtcccttttaa

SEQ ID NO: 874 - DNA, 23 bp, synthetic construct
  source 1..23: mol_type = other DNA
  modified_base 1: mod_base = OTHER; note = 2'-O-methyladenosine-3'-phosphorothioate
  modified_base 2: mod_base = OTHER; note = 2'-deoxy-2'-fluorocytidine-3'-phosphorothioate
  modified_base 3: mod_base = OTHER; note = 2'-O-methyluridine-3'-phosphate
  modified_base 4: mod_base = OTHER; note = 2'-O-methylguanosine-3'-phosphate
  modified_base 6: mod_base = OTHER; note = 2'-O-methylguanosine-3'-phosphate
  modified_base 8: mod_base = OTHER; note = 2'-O-methyladenosine-3'-phosphate
  modified_base 9: mod_base = OTHER; note = 2'-O-methyluridine-3'-phosphate
  modified_base 10: mod_base = OTHER; note = 2'-O-methyladenosine-3'-phosphate
  modified_base 11: mod_base = OTHER; note = 2'-O-methylcytidine-3'-phosphate
  modified_base 12: mod_base = OTHER; note = 2'-O-methyluridine-3'-phosphate
  modified_base 13: mod_base = OTHER; note = 2'-O-methylguanosine-3'-phosphate
  modified_base 14: mod_base = OTHER; note = 2'-deoxy-2'-fluorouridine-3'-phosphate
  modified_base 15: mod_base = OTHER; note = 2'-O-methylcytidine-3'-phosphate
  modified_base 16: mod_base = OTHER; note = 2'-deoxy-2'-fluorocytidine-3'-phosphate
  modified_base 17: mod_base = OTHER; note = 2'-O-methylcytidine-3'-phosphate
  modified_base 18: mod_base = OTHER; note = 2'-O-methyluridine-3'-phosphate
  modified_base 19: mod_base = OTHER; note = 2'-O-methyluridine-3'-phosphate
  modified_base 20: mod_base = OTHER; note = 2'-O-methyluridine-3'-phosphate
  modified_base 21: mod_base = OTHER; note = 2'-O-methyluridine-3'-phosphorothioate
  modified_base 22: mod_base = OTHER; note = 2'-O-methylguanosine-3'-phosphorothioate
  modified_base 23: mod_base = OTHER; note = 2'-O-methylcytidine
  misc_feature 1..4: note = RNA
  misc_feature 6: note = RNA
  misc_feature 8..23: note = RNA
  misc_feature 5: note = DNA
  misc_feature 7: note = DNA
actgagaatactgtcccttttgc

SEQ ID NO: 875 - DNA, 23 bp, synthetic construct
  source 1..23: mol_type = other DNA
  modified_base 1: mod_base = OTHER; note = 2'-O-methyladenosine-3'-phosphorothioate
  modified_base 2: mod_base = OTHER; note = 2'-deoxy-2'-fluorocytidine-3'-phosphorothioate
  modified_base 3: mod_base = OTHER; note = 2'-O-methyluridine-3'-phosphate
  modified_base 4: mod_base = OTHER; note = 2'-O-methylguanosine-3'-phosphate
  modified_base 6: mod_base = OTHER; note = 2'-O-methylguanosine-3'-phosphate
  modified_base 8: mod_base = OTHER; note = 2'-O-methyladenosine-3'-phosphate
  modified_base 9: mod_base = OTHER; note = 2'-O-methyluridine-3'-phosphate
  modified_base 10: mod_base = OTHER; note = 2'-O-methyladenosine-3'-phosphate
  modified_base 11: mod_base = OTHER; note = 2'-O-methylcytidine-3'-phosphate
  modified_base 12: mod_base = OTHER; note = 2'-O-methyluridine-3'-phosphate
  modified_base 13: mod_base = OTHER; note = 2'-O-methylguanosine-3'-phosphate
  modified_base 14: mod_base = OTHER; note = 2'-deoxy-2'-fluorouridine-3'-phosphate
  modified_base 15: mod_base = OTHER; note = 2'-O-methylcytidine-3'-phosphate
  modified_base 16: mod_base = OTHER; note = 2'-deoxy-2'-fluorocytidine-3'-phosphate
  modified_base 17: mod_base = OTHER; note = 2'-O-methylcytidine-3'-phosphate
  modified_base 18: mod_base = OTHER; note = 2'-O-methyluridine-3'-phosphate
  modified_base 19: mod_base = OTHER; note = 2'-O-methyluridine-3'-phosphate
  modified_base 20: mod_base = OTHER; note = 2'-O-methyluridine-3'-phosphate
  modified_base 21: mod_base = OTHER; note = 2'-O-methyluridine-3'-phosphorothioate
  modified_base 22: mod_base = OTHER; note = 2'-O-methylcytidine-3'-phosphorothioate
  modified_base 23: mod_base = OTHER; note = 2'-O-methylcytidine
  misc_feature 1..4: note = RNA
  misc_feature 6: note = RNA
  misc_feature 8..23: note = RNA
  misc_feature 5: note = DNA
  misc_feature 7: note = DNA
actgagaatactgtcccttttcc

SEQ ID NO: 876 - RNA, 19 nt, synthetic construct
  source 1..19: mol_type = other RNA
  modified_base 1: mod_base = OTHER; note = 2'-O-methyladenosine-3'-phosphorothioate
  modified_base 2: mod_base = OTHER; note = 2'-O-methyladenosine-3'-phosphorothioate
  modified_base 3: mod_base = OTHER; note = 2'-O-methylguanosine-3'-phosphate
  modified_base 4: mod_base = OTHER; note = 2'-O-methylguanosine-3'-phosphate
  modified_base 5: mod_base = OTHER; note = 2'-deoxy-2'-fluoroguanosine-3'-phosphate
  modified_base 6: mod_base = OTHER; note = 2'-O-methyladenosine-3'-phosphate
  modified_base 7: mod_base = OTHER; note = 2'-deoxy-2'-fluorocytidine-3'-phosphate
  modified_base 8: mod_base = OTHER; note = 2'-deoxy-2'-fluoroadenosine-3'-phosphate
  modified_base 9: mod_base = OTHER; note = 2'-deoxy-2'-fluoroguanosine-3'-phosphate
  modified_base 10: mod_base = OTHER; note = 2'-O-methyluridine-3'-phosphate
  modified_base 11: mod_base = OTHER; note = 2'-O-methyladenosine-3'-phosphate
  modified_base 12: mod_base = OTHER; note = 2'-O-methyluridine-3'-phosphate
  modified_base 13: mod_base = OTHER; note = 2'-O-methyluridine-3'-phosphate
  modified_base 14: mod_base = OTHER; note = 2'-O-methylcytidine-3'-phosphate
  modified_base 15: mod_base = OTHER; note = 2'-O-methyluridine-3'-phosphate
  modified_base 16: mod_base = OTHER; note = 2'-O-methylcytidine-3'-phosphate
  modified_base 17: mod_base = OTHER; note = 2'-O-methyladenosine-3'-phosphate
  modified_base 18: mod_base = OTHER; note = 2'-O-methylguanosine-3'-phosphate
  modified_base 19: mod_base = OTHER; note = 2'-O-methyluridine-3'-phosphate ((2S,4R)-1-[29-[[2-(acetylamino)-2-deoxy-beta-D-galactopyra nosyl]oxy]-14,14-bis[[3-[[3-[[5-[[2-(acetylamino)-2-deoxy-b eta-D-galactopyranosyl]oxy]-1-oxopentyl]amino]propyl]amino] -3-oxopropoxy]methyl]-1,12,19,25-tetraoxo-16-oxa-13,20,24-t riazanonacos-1-yl]-4-hydroxy-2-pyrrolidinyl)methyl ester
aagggacagtattctcagt

SEQ ID NO: 877 - DNA, 21 bp, synthetic construct
  source 1..21: mol_type = other DNA
  modified_base 1: mod_base = OTHER; note = 2'-O-methyladenosine-3'-phosphorothioate
  modified_base 2: mod_base = OTHER; note = 2'-deoxy-2'-fluorocytidine-3'-phosphorothioate
  modified_base 3: mod_base = OTHER; note = 2'-O-methyluridine-3'-phosphate
  modified_base 4: mod_base = OTHER; note = 2'-O-methylguanosine-3'-phosphate
  modified_base 6: mod_base = OTHER; note = 2'-O-methylguanosine-3'-phosphate
  modified_base 8: mod_base = OTHER; note = 2'-O-methyladenosine-3'-phosphate
  modified_base 9: mod_base = OTHER; note = 2'-O-methyluridine-3'-phosphate
  modified_base 10: mod_base = OTHER; note = 2'-O-methyladenosine-3'-phosphate
  modified_base 11: mod_base = OTHER; note = 2'-O-methylcytidine-3'-phosphate
  modified_base 12: mod_base = OTHER; note = 2'-O-methyluridine-3'-phosphate
  modified_base 13: mod_base = OTHER; note = 2'-O-methylguanosine-3'-phosphate
  modified_base 14: mod_base = OTHER; note = 2'-deoxy-2'-fluorouridine-3'-phosphate
  modified_base 15: mod_base = OTHER; note = 2'-O-methylcytidine-3'-phosphate
  modified_base 16: mod_base = OTHER; note = 2'-deoxy-2'-fluorocytidine-3'-phosphate
  modified_base 17: mod_base = OTHER; note = 2'-O-methylcytidine-3'-phosphate
  modified_base 18: mod_base = OTHER; note = 2'-O-methyluridine-3'-phosphate
  modified_base 19: mod_base = OTHER; note = 2'-O-methyluridine-3'-phosphorothioate
  modified_base 20: mod_base = OTHER; note = 2'-O-methyluridine-3'-phosphorothioate
  modified_base 21: mod_base = OTHER; note = 2'-O-methyluridine
  misc_feature 1..4: note = RNA
  misc_feature 6: note = RNA
  misc_feature 8..21: note = RNA
  misc_feature 5: note = DNA
  misc_feature 7: note = DNA
actgagaatactgtccctttt

SEQ ID NO: 878 - RNA, 21 nt, synthetic construct
  source 1..21: mol_type = other RNA
aaaagggacagtattctcagt

SEQ ID NO: 879 - DNA, 21 bp, synthetic construct
  source 1..21: mol_type = other DNA
  modified_base 1: mod_base = OTHER; note = 2'-O-methyladenosine-3'-phosphorothioate
  modified_base 2: mod_base = OTHER; note = 2'-O-methyladenosine-3'-phosphorothioate
  modified_base 3: mod_base = OTHER; note = 2'-O-methyladenosine-3'-phosphate
  modified_base 4: mod_base = OTHER; note = 2'-O-methyladenosine-3'-phosphate
  modified_base 5: mod_base = OTHER; note = 2'-O-methylguanosine-3'-phosphate
  modified_base 6: mod_base = OTHER; note = 2'-O-methylguanosine-3'-phosphate
  modified_base 7: mod_base = OTHER; note = 2'-O-methylguanosine-3'-phosphate
  modified_base 8: mod_base = OTHER; note = 2'-O-methyladenosine-3'-phosphate
  modified_base 9: mod_base = OTHER; note = 2'-deoxy-2'-fluorocytidine-3'-phosphate
  modified_base 10: mod_base = OTHER; note = 2'-O-methyladenosine-3'-phosphate
  modified_base 12: mod_base = OTHER; note = 2'-O-methyluridine-3'-phosphate
  modified_base 13: mod_base = OTHER; note = 2'-O-methyladenosine-3'-phosphate
  modified_base 14: mod_base = OTHER; note = 2'-O-methyluridine-3'-phosphate
  modified_base 15: mod_base = OTHER; note = 2'-O-methyluridine-3'-phosphate
  modified_base 16: mod_base = OTHER; note = 2'-O-methylcytidine-3'-phosphate
  modified_base 17: mod_base = OTHER; note = 2'-O-methyluridine-3'-phosphate
  modified_base 18: mod_base = OTHER; note = 2'-O-methylcytidine-3'-phosphate
  modified_base 19: mod_base = OTHER; note = 2'-O-methyladenosine-3'-phosphate
  modified_base 20: mod_base = OTHER; note = 2'-O-methylguanosine-3'-phosphate
  modified_base 21: mod_base = OTHER; note = 2'-O-methyluridine-3'-phosphate ((2S,4R)-1-[29-[[2-(acetylamino)-2-deoxy-beta-D-galactopyra nosyl]oxy]-14,14-bis[[3-[[3-[[5-[[2-(acetylamino)-2-deoxy-b eta-D-galactopyranosyl]oxy]-1-oxopentyl]amino]propyl]amino] -3-oxopropoxy]methyl]-1,12,19,25-tetraoxo-16-oxa-13,20,24-t riazanonacos-1-yl]-4-hydroxy-2-pyrrolidinyl)methyl ester
  misc_feature 1..10: note = RNA
  misc_feature 12..21: note = RNA
  misc_feature 11: note = DNA
aaaagggacagtattctcagt

SEQ ID NO: 880 - DNA, 21 bp, synthetic construct
  source 1..21: mol_type = other DNA
  modified_base 1: mod_base = OTHER; note = 2'-O-methyladenosine-3'-phosphorothioate
  modified_base 2: mod_base = OTHER; note = 2'-O-methyladenosine-3'-phosphorothioate
  modified_base 3: mod_base = OTHER; note = 2'-O-methyladenosine-3'-phosphate
  modified_base 4: mod_base = OTHER; note = 2'-O-methyladenosine-3'-phosphate
  modified_base 5: mod_base = OTHER; note = 2'-O-methylguanosine-3'-phosphate
  modified_base 6: mod_base = OTHER; note = 2'-O-methylguanosine-3'-phosphate
  modified_base 7: mod_base = OTHER; note = 2'-O-methylguanosine-3'-phosphate
  modified_base 8: mod_base = OTHER; note = 2'-O-methyladenosine-3'-phosphate
  modified_base 9: mod_base = OTHER; note = 2'-deoxy-2'-fluorocytidine-3'-phosphate
  modified_base 10: mod_base = OTHER; note = 2'-O-methyladenosine-3'-phosphate
  modified_base 12: mod_base = OTHER; note = 2'-O-methyluridine-3'-phosphate
  modified_base 13: mod_base = OTHER; note = 2'-O-methyladenosine-3'-phosphate
  modified_base 14: mod_base = OTHER; note = 2'-O-methyluridine-3'-phosphate
  modified_base 15: mod_base = OTHER; note = 2'-O-methyluridine-3'-phosphate
  modified_base 16: mod_base = OTHER; note = 2'-O-methyluridine-3'-phosphate
  modified_base 17: mod_base = OTHER; note = 2'-O-methyluridine-3'-phosphate
  modified_base 18: mod_base = OTHER; note = 2'-O-methylcytidine-3'-phosphate
  modified_base 19: mod_base = OTHER; note = 2'-O-methyladenosine-3'-phosphate
  modified_base 20: mod_base = OTHER; note = 2'-O-methylguanosine-3'-phosphate
  modified_base 21: mod_base = OTHER; note = 2'-O-methyluridine-3'-phosphate ((2S,4R)-1-[29-[[2-(acetylamino)-2-deoxy-beta-D-galactopyra nosyl]oxy]-14,14-bis[[3-[[3-[[5-[[2-(acetylamino)-2-deoxy-b eta-D-galactopyranosyl]oxy]-1-oxopentyl]amino]propyl]amino] -3-oxopropoxy]methyl]-1,12,19,25-tetraoxo-16-oxa-13,20,24-t riazanonacos-1-yl]-4-hydroxy-2-pyrrolidinyl)methyl ester
  misc_feature 1..10: note = RNA
  misc_feature 12..21: note = RNA
  misc_feature 11: note = DNA
aaaagggacagtattttcagt

SEQ ID NO: 881 - DNA, 23 bp, synthetic construct
  source 1..23: mol_type = other DNA
  modified_base 1: mod_base = OTHER; note = 2'-O-methyladenosine-3'-phosphorothioate
  modified_base 2: mod_base = OTHER; note = 2'-deoxy-2'-fluorocytidine-3'-phosphorothioate
  modified_base 3: mod_base = OTHER; note = 2'-O-methyluridine-3'-phosphate
  modified_base 4: mod_base = OTHER; note = 2'-O-methylguanosine-3'-phosphate
  modified_base 6: mod_base = OTHER; note = 2'-O-methyladenosine-3'-phosphate
  modified_base 8: mod_base = OTHER; note = 2'-O-methyladenosine-3'-phosphate
  modified_base 9: mod_base = OTHER; note = 2'-O-methyluridine-3'-phosphate
  modified_base 10: mod_base = OTHER; note = 2'-O-methyladenosine-3'-phosphate
  modified_base 11: mod_base = OTHER; note = 2'-O-methylcytidine-3'-phosphate
  modified_base 12: mod_base = OTHER; note = 2'-O-methyluridine-3'-phosphate
  modified_base 13: mod_base = OTHER; note = 2'-O-methylguanosine-3'-phosphate
  modified_base 14: mod_base = OTHER; note = 2'-deoxy-2'-fluorouridine-3'-phosphate
  modified_base 15: mod_base = OTHER; note = 2'-O-methylcytidine-3'-phosphate
  modified_base 16: mod_base = OTHER; note = 2'-deoxy-2'-fluorocytidine-3'-phosphate
  modified_base 17: mod_base = OTHER; note = 2'-O-methylcytidine-3'-phosphate
  modified_base 18: mod_base = OTHER; note = 2'-O-methyluridine-3'-phosphate
  modified_base 19: mod_base = OTHER; note = 2'-O-methyluridine-3'-phosphate
  modified_base 20: mod_base = OTHER; note = 2'-O-methyluridine-3'-phosphate
  modified_base 21: mod_base = OTHER; note = 2'-O-methyluridine-3'-phosphorothioate
  modified_base 22: mod_base = OTHER; note = 2'-O-methylguanosine-3'-phosphorothioate
  modified_base 23: mod_base = OTHER; note = 2'-O-methylcytidine
  misc_feature 1..4: note = RNA
  misc_feature 6: note = RNA
  misc_feature 8..23: note = RNA
  misc_feature 5: note = DNA
  misc_feature 7: note = DNA
actgaaaatactgtcccttttgc

SEQ ID NO: 882 - DNA, 21 bp, synthetic construct
  source 1..21: mol_type = other DNA
  modified_base 1: mod_base = OTHER; note = 2'-O-methyladenosine-3'-phosphorothioate
  modified_base 2: mod_base = OTHER; note = 2'-O-methyladenosine-3'-phosphorothioate
  modified_base 3: mod_base = OTHER; note = 2'-O-methyladenosine-3'-phosphate
  modified_base 4: mod_base = OTHER; note = 2'-O-methyladenosine-3'-phosphate
  modified_base 5: mod_base = OTHER; note = 2'-O-methylguanosine-3'-phosphate
  modified_base 6: mod_base = OTHER; note = 2'-O-methylguanosine-3'-phosphate
  modified_base 7: mod_base = OTHER; note = 2'-O-methylguanosine-3'-phosphate
  modified_base 8: mod_base = OTHER; note = 2'-O-methyladenosine-3'-phosphate
  modified_base 10: mod_base = OTHER; note = 2'-O-methyladenosine-3'-phosphate
  modified_base 12: mod_base = OTHER; note = 2'-O-methyluridine-3'-phosphate
  modified_base 13: mod_base = OTHER; note = 2'-O-methyladenosine-3'-phosphate
  modified_base 14: mod_base = OTHER; note = 2'-O-methyluridine-3'-phosphate
  modified_base 15: mod_base = OTHER; note = 2'-O-methyluridine-3'-phosphate
  modified_base 16: mod_base = OTHER; note = 2'-O-methylcytidine-3'-phosphate
  modified_base 17: mod_base = OTHER; note = 2'-O-methyluridine-3'-phosphate
  modified_base 18: mod_base = OTHER; note = 2'-O-methylcytidine-3'-phosphate
  modified_base 19: mod_base = OTHER; note = 2'-O-methyladenosine-3'-phosphate
  modified_base 20: mod_base = OTHER; note = 2'-O-methylguanosine-3'-phosphate
  modified_base 21: mod_base = OTHER; note = 2'-O-methyluridine-3'-phosphate ((2S,4R)-1-[29-[[2-(acetylamino)-2-deoxy-beta-D-galactopyra nosyl]oxy]-14,14-bis[[3-[[3-[[5-[[2-(acetylamino)-2-deoxy-b eta-D-galactopyranosyl]oxy]-1-oxopentyl]amino]propyl]amino] -3-oxopropoxy]methyl]-1,12,19,25-tetraoxo-16-oxa-13,20,24-t riazanonacos-1-yl]-4-hydroxy-2-pyrrolidinyl)methyl ester
  misc_feature 1..8: note = RNA
  misc_feature 10: note = RNA
  misc_feature 12..21: note = RNA
  misc_feature 9: note = DNA
  misc_feature 11: note = DNA
aaaagggacagtattctcagt

SEQ ID NO: 883 - DNA, 21 bp, synthetic construct
  source 1..21: mol_type = other DNA
  modified_base 1: mod_base = OTHER; note = 2'-O-methyladenosine-3'-phosphorothioate
  modified_base 2: mod_base = OTHER; note = 2'-O-methyladenosine-3'-phosphorothioate
  modified_base 3: mod_base = OTHER; note = 2'-O-methyladenosine-3'-phosphate
  modified_base 4: mod_base = OTHER; note = 2'-O-methyladenosine-3'-phosphate
  modified_base 5: mod_base = OTHER; note = 2'-O-methylguanosine-3'-phosphate
  modified_base 6: mod_base = OTHER; note = 2'-O-methylguanosine-3'-phosphate
  modified_base 7: mod_base = OTHER; note = 2'-O-methylguanosine-3'-phosphate
  modified_base 8: mod_base = OTHER; note = 2'-O-methyladenosine-3'-phosphate
  modified_base 10: mod_base = OTHER; note = 2'-O-methyladenosine-3'-phosphate
  modified_base 12: mod_base = OTHER; note = 2'-deoxy-2'-fluorouridine-3'-phosphate
  modified_base 13: mod_base = OTHER; note = 2'-O-methyladenosine-3'-phosphate
  modified_base 14: mod_base = OTHER; note = 2'-O-methyluridine-3'-phosphate
  modified_base 15: mod_base = OTHER; note = 2'-O-methyluridine-3'-phosphate
  modified_base 16: mod_base = OTHER; note = 2'-O-methylcytidine-3'-phosphate
  modified_base 17: mod_base = OTHER; note = 2'-O-methyluridine-3'-phosphate
  modified_base 18: mod_base = OTHER; note = 2'-O-methylcytidine-3'-phosphate
  modified_base 19: mod_base = OTHER; note = 2'-O-methyladenosine-3'-phosphate
  modified_base 20: mod_base = OTHER; note = 2'-O-methylguanosine-3'-phosphate
  modified_base 21: mod_base = OTHER; note = 2'-O-methyluridine-3'-phosphate ((2S,4R)-1-[29-[[2-(acetylamino)-2-deoxy-beta-D-galactopyra nosyl]oxy]-14,14-bis[[3-[[3-[[5-[[2-(acetylamino)-2-deoxy-b eta-D-galactopyranosyl]oxy]-1-oxopentyl]amino]propyl]amino] -3-oxopropoxy]methyl]-1,12,19,25-tetraoxo-16-oxa-13,20,24-t riazanonacos-1-yl]-4-hydroxy-2-pyrrolidinyl)methyl ester
  misc_feature 1..8: note = RNA
  misc_feature 10: note = RNA
  misc_feature 12..21: note = RNA
  misc_feature 9: note = DNA
  misc_feature 11: note = DNA
aaaagggacagtattctcagt

SEQ ID NO: 884 - RNA, 21 nt, synthetic construct
  source 1..21: mol_type = other RNA
  modified_base 1: mod_base = OTHER; note = 2'-O-methylcytidine-3'-phosphorothioate
  modified_base 2: mod_base = OTHER; note = 2'-O-methylcytidine-3'-phosphorothioate
  modified_base 3: mod_base = OTHER; note = 2'-O-methyladenosine-3'-phosphate
  modified_base 4: mod_base = OTHER; note = 2'-O-methyladenosine-3'-phosphate
  modified_base 5: mod_base = OTHER; note = 2'-O-methyluridine-3'-phosphate
  modified_base 6: mod_base = OTHER; note = 2'-O-methyladenosine-3'-phosphate
  modified_base 7: mod_base = OTHER; note = 2'-deoxy-2'-fluoroadenosine-3'-phosphate
  modified_base 8: mod_base = OTHER; note = 2'-O-methyladenosine-3'-phosphate
  modified_base 9: mod_base = OTHER; note = 2'-deoxy-2'-fluoroguanosine-3'-phosphate
  modified_base 10: mod_base = OTHER; note = 2'-deoxy-2'-fluorocytidine-3'-phosphate
  modified_base 11: mod_base = OTHER; note = 2'-deoxy-2'-fluorouridine-3'-phosphate
  modified_base 12: mod_base = OTHER; note = 2'-O-methylguanosine-3'-phosphate
  modified_base 13: mod_base = OTHER; note = 2'-O-methylguanosine-3'-phosphate
  modified_base 14: mod_base = OTHER; note = 2'-O-methyladenosine-3'-phosphate
  modified_base 15: mod_base = OTHER; note = 2'-O-methyluridine-3'-phosphate
  modified_base 16: mod_base = OTHER; note = 2'-O-methyladenosine-3'-phosphate
  modified_base 17: mod_base = OTHER; note = 2'-O-methyladenosine-3'-phosphate
  modified_base 18: mod_base = OTHER; note = 2'-O-methylguanosine-3'-phosphate
  modified_base 19: mod_base = OTHER; note = 2'-O-methyladenosine-3'-phosphate
  modified_base 20: mod_base = OTHER; note = 2'-O-methyladenosine-3'-phosphate
  modified_base 21: mod_base = OTHER; note = 2'-O-methyluridine-3'-phosphate ((2S,4R)-1-[29-[[2-(acetylamino)-2-deoxy-beta-D-galactopyra nosyl]oxy]-14,14-bis[[3-[[3-[[5-[[2-(acetylamino)-2-deoxy-b eta-D-galactopyranosyl]oxy]-1-oxopentyl]amino]propyl]amino] -3-oxopropoxy]methyl]-1,12,19,25-tetraoxo-16-oxa-13,20,24-t riazanonacos-1-yl]-4-hydroxy-2-pyrrolidinyl)methyl ester
ccaataaagctggataagaat

SEQ ID NO: 885 - RNA, 23 nt, synthetic construct
  source 1..23: mol_type = other RNA
  modified_base 1: mod_base = OTHER; note = 2'-O-methyladenosine-3'-phosphorothioate
  modified_base 2: mod_base = OTHER; note = 2'-deoxy-2'-fluorouridine-3'-phosphorothioate
  modified_base 3: mod_base = OTHER; note = 2'-O-methyluridine-3'-phosphate
  modified_base 4: mod_base = OTHER; note = 2'-O-methylcytidine-3'-phosphate
  modified_base 5: mod_base = OTHER; note = 2'-O-methyluridine-3'-phosphate
  modified_base 6: mod_base = OTHER; note = 2'-deoxy-2'-fluorouridine-3'-phosphate
  modified_base 7: mod_base = OTHER; note = 2'-O-methyladenosine-3'-phosphate
  modified_base 8: mod_base = OTHER; note = 2'-O-methyluridine-3'-phosphate
  modified_base 9: mod_base = OTHER; note = 2'-O-methylcytidine-3'-phosphate
  modified_base 10: mod_base = OTHER; note = 2'-O-methylcytidine-3'-phosphate
  modified_base 11: mod_base = OTHER; note = 2'-O-methyladenosine-3'-phosphate
  modified_base 12: mod_base = OTHER; note = 2'-O-methylguanosine-3'-phosphate
  modified_base 13: mod_base = OTHER; note = 2'-O-methylcytidine-3'-phosphate
  modified_base 14: mod_base = OTHER; note = 2'-deoxy-2'-fluorouridine-3'-phosphate
  modified_base 15: mod_base = OTHER; note = 2'-O-methyluridine-3'-phosphate
  modified_base 16: mod_base = OTHER; note = 2'-deoxy-2'-fluorouridine-3'-phosphate
  modified_base 17: mod_base = OTHER; note = 2'-O-methyladenosine-3'-phosphate
  modified_base 18: mod_base = OTHER; note = 2'-O-methyluridine-3'-phosphate
  modified_base 19: mod_base = OTHER; note = 2'-O-methyluridine-3'-phosphate
  modified_base 20: mod_base = OTHER; note = 2'-O-methylguanosine-3'-phosphate
  modified_base 21: mod_base = OTHER; note = 2'-O-methylguanosine-3'-phosphorothioate
  modified_base 22: mod_base = OTHER; note = 2'-O-methylguanosine-3'-phosphorothioate
  modified_base 23: mod_base = OTHER; note = 2'-O-methyladenosine
attcttatccagctttattggga

SEQ ID NO: 886 - DNA, 23 bp, synthetic construct
  source 1..23: mol_type = other DNA
  modified_base 1: mod_base = OTHER; note = 2'-O-methyladenosine-3'-phosphorothioate
  modified_base 2: mod_base = OTHER; note = 2'-deoxy-2'-fluorouridine-3'-phosphorothioate
  modified_base 3: mod_base = OTHER; note = 2'-O-methyluridine-3'-phosphate
  modified_base 4: mod_base = OTHER; note = 2'-O-methylcytidine-3'-phosphate
  modified_base 6: mod_base = OTHER; note = 2'-O-methyluridine-3'-phosphate
  modified_base 7: mod_base = OTHER; note = guanosine-2'-phosphate
  modified_base 8: mod_base = OTHER; note = 2'-O-methyluridine-3'-phosphate
  modified_base 9: mod_base = OTHER; note = 2'-O-methylcytidine-3'-phosphate
  modified_base 10: mod_base = OTHER; note = 2'-O-methylcytidine-3'-phosphate
  modified_base 11: mod_base = OTHER; note = 2'-O-methyladenosine-3'-phosphate
  modified_base 12: mod_base = OTHER; note = 2'-O-methylguanosine-3'-phosphate
  modified_base 13: mod_base = OTHER; note = 2'-O-methylcytidine-3'-phosphate
  modified_base 14: mod_base = OTHER; note = 2'-deoxy-2'-fluorouridine-3'-phosphate
  modified_base 15: mod_base = OTHER; note = 2'-O-methyluridine-3'-phosphate
  modified_base 16: mod_base = OTHER; note = 2'-deoxy-2'-fluorouridine-3'-phosphate
  modified_base 17: mod_base = OTHER; note = 2'-O-methyladenosine-3'-phosphate
  modified_base 18: mod_base = OTHER; note = 2'-O-methyluridine-3'-phosphate
  modified_base 19: mod_base = OTHER; note = 2'-O-methyluridine-3'-phosphate
  modified_base 20: mod_base = OTHER; note = 2'-O-methylguanosine-3'-phosphate
  modified_base 21: mod_base = OTHER; note = 2'-O-methylguanosine-3'-phosphorothioate
  modified_base 22: mod_base = OTHER; note = 2'-O-methylguanosine-3'-phosphorothioate
  modified_base 23: mod_base = OTHER; note = 2'-O-methyladenosine
  misc_feature 1..4: note = RNA
  misc_feature 6..23: note = RNA
  misc_feature 5: note = DNA
attcttgtccagctttattggga

SEQ ID NO: 887 - DNA, 23 bp, synthetic construct
  source 1..23: mol_type = other DNA
  modified_base 1: mod_base = OTHER; note = 2'-O-methyladenosine-3'-phosphorothioate
  modified_base 2: mod_base = OTHER; note = 2'-deoxy-2'-fluorouridine-3'-phosphorothioate
  modified_base 3: mod_base = OTHER; note = 2'-O-methyluridine-3'-phosphate
  modified_base 4: mod_base = OTHER; note = 2'-O-methylcytidine-3'-phosphate
  modified_base 6: mod_base = OTHER; note = 2'-O-methyluridine-3'-phosphate
  modified_base 7: mod_base = OTHER; note = guanosine-2'-phosphate
  modified_base 8: mod_base = OTHER; note = 2'-O-methyluridine-3'-phosphate
  modified_base 9: mod_base = OTHER; note = 2'-O-methylcytidine-3'-phosphate
  modified_base 10: mod_base = OTHER; note = 2'-O-methylcytidine-3'-phosphate
  modified_base 11: mod_base = OTHER; note = 2'-O-methyladenosine-3'-phosphate
  modified_base 12: mod_base = OTHER; note = 2'-O-methylguanosine-3'-phosphate
  modified_base 13: mod_base = OTHER; note = 2'-O-methylcytidine-3'-phosphate
  modified_base 14: mod_base = OTHER; note = 2'-deoxy-2'-fluorouridine-3'-phosphate
  modified_base 15: mod_base = OTHER; note = 2'-O-methyluridine-3'-phosphate
  modified_base 16: mod_base = OTHER; note = 2'-deoxy-2'-fluorouridine-3'-phosphate
  modified_base 17: mod_base = OTHER; note = 2'-O-methyladenosine-3'-phosphate
  modified_base 18: mod_base = OTHER; note = 2'-O-methyluridine-3'-phosphate
  modified_base 19: mod_base = OTHER; note = 2'-O-methyluridine-3'-phosphate
  modified_base 20: mod_base = OTHER; note = 2'-O-methylguanosine-3'-phosphate
  modified_base 21: mod_base = OTHER; note = 2'-O-methylguanosine-3'-phosphorothioate
  modified_base 22: mod_base = OTHER; note = 2'-O-methylguanosine-3'-phosphorothioate
  modified_base 23: mod_base = OTHER; note = 2'-O-methylcytidine
  misc_feature 1..4: note = RNA
  misc_feature 6..23: note = RNA
  misc_feature 5: note = DNA
attcttgtccagctttattgggc

SEQ ID NO: 888 - RNA, 19 nt, synthetic construct
  source 1..19: mol_type = other RNA
  modified_base 1: mod_base = OTHER; note = 2'-O-methyladenosine-3'-phosphorothioate
  modified_base 2: mod_base = OTHER; note = 2'-O-methyladenosine-3'-phosphorothioate
  modified_base 3: mod_base = OTHER; note = 2'-O-methyluridine-3'-phosphate
  modified_base 4: mod_base = OTHER; note = 2'-O-methyladenosine-3'-phosphate
  modified_base 5: mod_base = OTHER; note = 2'-deoxy-2'-fluoroadenosine-3'-phosphate
  modified_base 6: mod_base = OTHER; note = 2'-O-methyladenosine-3'-phosphate
  modified_base 7: mod_base = OTHER; note = 2'-deoxy-2'-fluoroguanosine-3'-phosphate
  modified_base 8: mod_base = OTHER; note = 2'-deoxy-2'-fluorocytidine-3'-phosphate
  modified_base 9: mod_base = OTHER; note = 2'-deoxy-2'-fluorouridine-3'-phosphate
  modified_base 10: mod_base = OTHER; note = 2'-O-methylguanosine-3'-phosphate
  modified_base 11: mod_base = OTHER; note = 2'-O-methylguanosine-3'-phosphate
  modified_base 12: mod_base = OTHER; note = 2'-O-methyladenosine-3'-phosphate
  modified_base 13: mod_base = OTHER; note = 2'-O-methylcytidine-3'-phosphate
  modified_base 14: mod_base = OTHER; note = 2'-O-methyladenosine-3'-phosphate
  modified_base 15: mod_base = OTHER; note = 2'-O-methyladenosine-3'-phosphate
  modified_base 16: mod_base = OTHER; note = 2'-O-methylguanosine-3'-phosphate
  modified_base 17: mod_base = OTHER; note = 2'-O-methyladenosine-3'-phosphate
  modified_base 18: mod_base = OTHER; note = 2'-O-methyladenosine-3'-phosphate
  modified_base 19: mod_base = OTHER; note = 2'-O-methyluridine-3'-phosphate ((2S,4R)-1-[29-[[2-(acetylamino)-2-deoxy-beta-D-galactopyra nosyl]oxy]-14,14-bis[[3-[[3-[[5-[[2-(acetylamino)-2-deoxy-b eta-D-galactopyranosyl]oxy]-1-oxopentyl]amino]propyl]amino] -3-oxopropoxy]methyl]-1,12,19,25-tetraoxo-16-oxa-13,20,24-t riazanonacos-1-yl]-4-hydroxy-2-pyrrolidinyl)methyl ester
aataaagctggacaagaat

SEQ ID NO: 889 - DNA, 21 bp, synthetic construct
  source 1..21: mol_type = other DNA
  modified_base 1: mod_base = OTHER; note = 2'-O-methyladenosine-3'-phosphorothioate
  modified_base 2: mod_base = OTHER; note = 2'-deoxy-2'-fluorouridine-3'-phosphorothioate
  modified_base 3: mod_base = OTHER; note = 2'-O-methyluridine-3'-phosphate
  modified_base 4: mod_base = OTHER; note = 2'-O-methylcytidine-3'-phosphate
  modified_base 6: mod_base = OTHER; note = 2'-O-methyluridine-3'-phosphate
  modified_base 7: mod_base = OTHER; note = guanosine-2'-phosphate
  modified_base 8: mod_base = OTHER; note = 2'-O-methyluridine-3'-phosphate
  modified_base 9: mod_base = OTHER; note = 2'-O-methylcytidine-3'-phosphate
  modified_base 10: mod_base = OTHER; note = 2'-O-methylcytidine-3'-phosphate
  modified_base 11: mod_base = OTHER; note = 2'-O-methyladenosine-3'-phosphate
  modified_base 12: mod_base = OTHER; note = 2'-O-methylguanosine-3'-phosphate
  modified_base 13: mod_base = OTHER; note = 2'-O-methylcytidine-3'-phosphate
  modified_base 14: mod_base = OTHER; note = 2'-deoxy-2'-fluorouridine-3'-phosphate
  modified_base 15: mod_base = OTHER; note = 2'-O-methyluridine-3'-phosphate
  modified_base 16: mod_base = OTHER; note = 2'-deoxy-2'-fluorouridine-3'-phosphate
  modified_base 17: mod_base = OTHER; note = 2'-O-methyladenosine-3'-phosphate
  modified_base 18: mod_base = OTHER; note = 2'-O-methyluridine-3'-phosphate
  modified_base 19: mod_base = OTHER; note = 2'-O-methyluridine-3'-phosphorothioate
  modified_base 20: mod_base = OTHER; note = 2'-O-methylguanosine-3'-phosphorothioate
  modified_base 21: mod_base = OTHER; note = 2'-O-methylguanosine
  misc_feature 1..4: note = RNA
  misc_feature 6..21: note = RNA
  misc_feature 5: note = DNA
attcttgtccagctttattgg

SEQ ID NO: 890 - RNA, 21 nt, synthetic construct
  source 1..21: mol_type = other RNA
ccaataaagctggacaagaag

SEQ ID NO: 891 - DNA, 21 bp, synthetic construct
  source 1..21: mol_type = other DNA
  modified_base 1: mod_base = OTHER; note = 2'-O-methyladenosine-3'-phosphorothioate
  modified_base 2: mod_base = OTHER; note = 2'-deoxy-2'-fluorouridine-3'-phosphorothioate
  modified_base 3: mod_base = OTHER; note = 2'-O-methyluridine-3'-phosphate
  modified_base 4: mod_base = OTHER; note = 2'-O-methylcytidine-3'-phosphate
  modified_base 6: mod_base = OTHER; note = 2'-O-methyluridine-3'-phosphate
  modified_base 7: mod_base = OTHER; note = guanosine-2'-phosphate
  modified_base 8: mod_base = OTHER; note = 2'-O-methyluridine-3'-phosphate
  modified_base 9: mod_base = OTHER; note = 2'-O-methylcytidine-3'-phosphate
  modified_base 10: mod_base = OTHER; note = 2'-O-methylcytidine-3'-phosphate
  modified_base 11: mod_base = OTHER; note = 2'-O-methyladenosine-3'-phosphate
  modified_base 12: mod_base = OTHER; note = 2'-O-methylguanosine-3'-phosphate
  modified_base 13: mod_base = OTHER; note = 2'-O-methylcytidine-3'-phosphate
  modified_base 14: mod_base = OTHER; note = 2'-deoxy-2'-fluorouridine-3'-phosphate
  modified_base 15: mod_base = OTHER; note = 2'-O-methyluridine-3'-phosphate
  modified_base 16: mod_base = OTHER; note = 2'-deoxy-2'-fluorouridine-3'-phosphate
  modified_base 17: mod_base = OTHER; note = 2'-O-methyladenosine-3'-phosphate
  modified_base 18: mod_base = OTHER; note = 2'-O-methyluridine-3'-phosphate
  modified_base 19: mod_base = OTHER; note = 2'-O-methyluridine-3'-phosphorothioate
  modified_base 20: mod_base = OTHER; note = 2'-O-methylcytidine-3'-phosphorothioate
  modified_base 21: mod_base = OTHER; note = 2'-O-methylcytidine
  misc_feature 1..4: note = RNA
  misc_feature 6..21: note = RNA
  misc_feature 5: note = DNA
attcttgtccagctttattcc

SEQ ID NO: 892 - RNA, 21 nt, synthetic construct
  source 1..21: mol_type = other RNA
  modified_base 1: mod_base = OTHER; note = 2'-O-methylcytidine-3'-phosphorothioate
  modified_base 2: mod_base = OTHER; note = 2'-O-methylcytidine-3'-phosphorothioate
  modified_base 3: mod_base = OTHER; note = 2'-O-methyladenosine-3'-phosphate
  modified_base 4: mod_base = OTHER; note = 2'-O-methyladenosine-3'-phosphate
  modified_base 5: mod_base = OTHER; note = 2'-O-methyluridine-3'-phosphate
  modified_base 6: mod_base = OTHER; note = 2'-O-methyladenosine-3'-phosphate
  modified_base 7: mod_base = OTHER; note = 2'-O-methyladenosine-3'-phosphate
  modified_base 8: mod_base = OTHER; note = 2'-O-methyladenosine-3'-phosphate
  modified_base 9: mod_base = OTHER; note = 2'-O-methylguanosine-3'-phosphate
  modified_base 10: mod_base = OTHER; note = 2'-deoxy-2'-fluorocytidine-3'-phosphate
  modified_base 11: mod_base = OTHER; note = 2'-deoxy-2'-fluorouridine-3'-phosphate
  modified_base 12: mod_base = OTHER; note = 2'-O-methylguanosine-3'-phosphate
  modified_base 13: mod_base = OTHER; note = 2'-O-methylguanosine-3'-phosphate
  modified_base 14: mod_base = OTHER; note = 2'-O-methyladenosine-3'-phosphate
  modified_base 15: mod_base = OTHER; note = 2'-O-methylcytidine-3'-phosphate
  modified_base 16: mod_base = OTHER; note = 2'-O-methyladenosine-3'-phosphate
  modified_base 17: mod_base = OTHER; note = 2'-O-methyladenosine-3'-phosphate
  modified_base 18: mod_base = OTHER; note = 2'-O-methylguanosine-3'-phosphate
  modified_base 19: mod_base = OTHER; note = 2'-O-methyladenosine-3'-phosphate
  modified_base 20: mod_base = OTHER; note = 2'-O-methyladenosine-3'-phosphate
  modified_base 21: mod_base = OTHER; note = 2'-O-methyluridine-3'-phosphate ((2S,4R)-1-[29-[[2-(acetylamino)-2-deoxy-beta-D-galactopyra nosyl]oxy]-14,14-bis[[3-[[3-[[5-[[2-(acetylamino)-2-deoxy-b eta-D-galactopyranosyl]oxy]-1-oxopentyl]amino]propyl]amino] -3-oxopropoxy]methyl]-1,12,19,25-tetraoxo-16-oxa-13,20,24-t riazanonacos-1-yl]-4-hydroxy-2-pyrrolidinyl)methyl ester
ccaataaagctggacaagaat

SEQ ID NO: 893 - DNA, 21 bp, synthetic construct
  source 1..21: mol_type = other DNA
  modified_base 1: mod_base = OTHER; note = 2'-O-methylcytidine-3'-phosphorothioate
  modified_base 2: mod_base = OTHER; note = 2'-O-methylcytidine-3'-phosphorothioate
  modified_base 3: mod_base = OTHER; note = 2'-O-methyladenosine-3'-phosphate
  modified_base 4: mod_base = OTHER; note = 2'-O-methyladenosine-3'-phosphate
  modified_base 5: mod_base = OTHER; note = 2'-O-methyluridine-3'-phosphate
  modified_base 6: mod_base = OTHER; note = 2'-O-methyladenosine-3'-phosphate
  modified_base 8: mod_base = OTHER; note = 2'-O-methyladenosine-3'-phosphate
  modified_base 9: mod_base = OTHER; note = 2'-O-methylguanosine-3'-phosphate
  modified_base 10: mod_base = OTHER; note = 2'-deoxy-2'-fluorocytidine-3'-phosphate
  modified_base 11: mod_base = OTHER; note = 2'-deoxy-2'-fluorouridine-3'-phosphate
  modified_base 12: mod_base = OTHER; note = 2'-O-methylguanosine-3'-phosphate
  modified_base 13: mod_base = OTHER; note = 2'-O-methylguanosine-3'-phosphate
  modified_base 14: mod_base = OTHER; note = 2'-O-methyladenosine-3'-phosphate
  modified_base 15: mod_base = OTHER; note = 2'-O-methylcytidine-3'-phosphate
  modified_base 16: mod_base = OTHER; note = 2'-O-methyladenosine-3'-phosphate
  modified_base 17: mod_base = OTHER; note = 2'-O-methyladenosine-3'-phosphate
  modified_base 18: mod_base = OTHER; note = 2'-O-methylguanosine-3'-phosphate
  modified_base 19: mod_base = OTHER; note = 2'-O-methyladenosine-3'-phosphate
  modified_base 20: mod_base = OTHER; note = 2'-O-methyladenosine-3'-phosphate
  modified_base 21: mod_base = OTHER; note = 2'-O-methyluridine-3'-phosphate ((2S,4R)-1-[29-[[2-(acetylamino)-2-deoxy-beta-D-galactopyra nosyl]oxy]-14,14-bis[[3-[[3-[[5-[[2-(acetylamino)-2-deoxy-b eta-D-galactopyranosyl]oxy]-1-oxopentyl]amino]propyl]amino] -3-oxopropoxy]methyl]-1,12,19,25-tetraoxo-16-oxa-13,20,24-t riazanonacos-1-yl]-4-hydroxy-2-pyrrolidinyl)methyl ester
  misc_feature 1..6: note = RNA
  misc_feature 8..21: note = RNA
  misc_feature 7: note = DNA
ccaataaagctggacaagaat

SEQ ID NO: 894 - RNA, 23 nt, synthetic construct
  source 1..23: mol_type = other RNA
  modified_base 1: mod_base = OTHER; note = 2'-O-methyladenosine-3'-phosphorothioate
  modified_base 2: mod_base = OTHER; note = 2'-deoxy-2'-fluorouridine-3'-phosphorothioate
  modified_base 3: mod_base = OTHER; note = 2'-O-methyluridine-3'-phosphate
  modified_base 4: mod_base = OTHER; note = 2'-O-methylcytidine-3'-phosphate
  modified_base 5: mod_base = OTHER; note = 2'-O-methyluridine-3'-phosphate
  modified_base 6: mod_base = OTHER; note = 2'-deoxy-2'-fluorouridine-3'-phosphate
  modified_base 7: mod_base = OTHER; note = 2'-O-methylguanosine-3'-phosphate
  modified_base 8: mod_base = OTHER; note = 2'-O-methyluridine-3'-phosphate
  modified_base 9: mod_base = OTHER; note = 2'-O-methylcytidine-3'-phosphate
  modified_base 10: mod_base = OTHER; note = 2'-O-methylcytidine-3'-phosphate
  modified_base 11: mod_base = OTHER; note = 2'-O-methyladenosine-3'-phosphate
  modified_base 12: mod_base = OTHER; note = 2'-O-methylguanosine-3'-phosphate
  modified_base 13: mod_base = OTHER; note = 2'-O-methylcytidine-3'-phosphate
  modified_base 14: mod_base = OTHER; note = 2'-deoxy-2'-fluorouridine-3'-phosphate
  modified_base 15: mod_base = OTHER; note = 2'-O-methyluridine-3'-phosphate
  modified_base 16: mod_base = OTHER; note = 2'-deoxy-2'-fluorouridine-3'-phosphate
  modified_base 17: mod_base = OTHER; note = 2'-O-methyladenosine-3'-phosphate
  modified_base 18: mod_base = OTHER; note = 2'-O-methyluridine-3'-phosphate
  modified_base 19: mod_base = OTHER; note = 2'-O-methyluridine-3'-phosphate
  modified_base 20: mod_base = OTHER; note = 2'-O-methylguanosine-3'-phosphate
  modified_base 21: mod_base = OTHER; note = 2'-O-methylguanosine-3'-phosphorothioate
  modified_base 22: mod_base = OTHER; note = 2'-O-methylguanosine-3'-phosphorothioate
  modified_base 23: mod_base = OTHER; note = 2'-O-methyladenosine
attcttgtccagctttattggga

SEQ ID NO: 895 - DNA, 23 bp, synthetic construct
  source 1..23: mol_type = other DNA
  modified_base 1: mod_base = OTHER; note = 2'-O-methyladenosine-3'-phosphorothioate
  modified_base 2: mod_base = OTHER; note = 2'-deoxy-2'-fluoroadenosine-3'-phosphorothioate
  modified_base 3: mod_base = OTHER; note = 2'-O-methylguanosine-3'-phosphate
  modified_base 4: mod_base = OTHER; note = 2'-O-methylcytidine-3'-phosphate
  modified_base 6: mod_base = OTHER; note = 2'-O-methylguanosine-3'-phosphate
  modified_base 7: mod_base = OTHER; note = Cytidine-glycol nucleic acid (GNA), S-isomer
  modified_base 8: mod_base = OTHER; note = 2'-O-methyluridine-3'-phosphate
  modified_base 9: mod_base = OTHER; note = 2'-O-methyluridine-3'-phosphate
  modified_base 10: mod_base = OTHER; note = 2'-O-methylcytidine-3'-phosphate
  modified_base 11: mod_base = OTHER; note = 2'-O-methyluridine-3'-phosphate
  modified_base 12: mod_base = OTHER; note = 2'-O-methyluridine-3'-phosphate
  modified_base 13: mod_base = OTHER; note = 2'-O-methylguanosine-3'-phosphate
  modified_base 14: mod_base = OTHER; note = 2'-deoxy-2'-fluorouridine-3'-phosphate
  modified_base 15: mod_base = OTHER; note = 2'-O-methylcytidine-3'-phosphate
  modified_base 16: mod_base = OTHER; note = 2'-deoxy-2'-fluorocytidine-3'-phosphate
  modified_base 17: mod_base = OTHER; note = 2'-O-methyladenosine-3'-phosphate
  modified_base 18: mod_base = OTHER; note = 2'-O-methylguanosine-3'-phosphate
  modified_base 19: mod_base = OTHER; note = 2'-O-methylcytidine-3'-phosphate
  modified_base 20: mod_base = OTHER; note = 2'-O-methyluridine-3'-phosphate
  modified_base 21: mod_base = OTHER; note = 2'-O-methyluridine-3'-phosphorothioate
  modified_base 22: mod_base = OTHER; note = 2'-O-methyluridine-3'-phosphorothioate
  modified_base 23: mod_base = OTHER; note = 2'-O-methyladenosine
  misc_feature 1..4: note = RNA
  misc_feature 6..23: note = RNA
  misc_feature 5: note = DNA
aagcagcttcttgtccagcttta

SEQ ID NO: 896 - DNA, 23 bp, synthetic construct
  source 1..23: mol_type = other DNA
  modified_base 1: mod_base = OTHER; note = 2'-O-methyladenosine-3'-phosphorothioate
  modified_base 2: mod_base = OTHER; note = 2'-deoxyadenosine-3'-phosphorothioate
  modified_base 3: mod_base = OTHER; note = 2'-O-methylguanosine-3'-phosphate
  modified_base 4: mod_base = OTHER; note = 2'-O-methylcytidine-3'-phosphate
  modified_base 6: mod_base = OTHER; note = 2'-O-methylguanosine-3'-phosphate
  modified_base 7: mod_base = OTHER; note = Cytidine-glycol nucleic acid (GNA), S-isomer
  modified_base 8: mod_base = OTHER; note = 2'-O-methyluridine-3'-phosphate
  modified_base 9: mod_base = OTHER; note = 2'-O-methyluridine-3'-phosphate
  modified_base 10: mod_base = OTHER; note = 2'-O-methylcytidine-3'-phosphate
  modified_base 11: mod_base = OTHER; note = 2'-O-methyluridine-3'-phosphate
  modified_base 12: mod_base = OTHER; note = 2'-O-methyluridine-3'-phosphate
  modified_base 13: mod_base = OTHER; note = 2'-O-methylguanosine-3'-phosphate
  modified_base 14: mod_base = OTHER; note = 2'-deoxy-2'-fluorouridine-3'-phosphate
  modified_base 15: mod_base = OTHER; note = 2'-O-methylcytidine-3'-phosphate
  modified_base 16: mod_base = OTHER; note = 2'-deoxy-2'-fluorocytidine-3'-phosphate
  modified_base 17: mod_base = OTHER; note = 2'-O-methyladenosine-3'-phosphate
  modified_base 18: mod_base = OTHER; note = 2'-O-methylguanosine-3'-phosphate
  modified_base 19: mod_base = OTHER; note = 2'-O-methylcytidine-3'-phosphate
  modified_base 20: mod_base = OTHER; note = 2'-O-methyluridine-3'-phosphate
  modified_base 21: mod_base = OTHER; note = 2'-O-methyluridine-3'-phosphorothioate
  modified_base 22: mod_base = OTHER; note = 2'-O-methyluridine-3'-phosphorothioate
  modified_base 23: mod_base = OTHER; note = 2'-O-methyladenosine
  misc_feature 1: note = RNA
  misc_feature 3..4: note = RNA
  misc_feature 6..23: note = RNA
  misc_feature 2: note = DNA
  misc_feature 5: note = DNA
aagcagcttcttgtccagcttta

SEQ ID NO: 897 - DNA, 23 bp, synthetic construct
  source 1..23: mol_type = other DNA
  modified_base 1: mod_base = OTHER; note = 2'-O-methyladenosine-3'-phosphorothioate
  modified_base 2: mod_base = OTHER; note = 2'-deoxyadenosine-3'-phosphorothioate
  modified_base 3: mod_base = OTHER; note = 2'-O-methylguanosine-3'-phosphate
  modified_base 4: mod_base = OTHER; note = 2'-O-methylcytidine-3'-phosphate
  modified_base 6: mod_base = OTHER; note = 2'-O-methylguanosine-3'-phosphate
  modified_base 7: mod_base = OTHER; note = cytidine-2'-phosphate
  modified_base 8: mod_base = OTHER; note = 2'-O-methyluridine-3'-phosphate
  modified_base 9: mod_base = OTHER; note = 2'-O-methyluridine-3'-phosphate
  modified_base 10: mod_base = OTHER; note = 2'-O-methylcytidine-3'-phosphate
  modified_base 11: mod_base = OTHER; note = 2'-O-methyluridine-3'-phosphate
  modified_base 12: mod_base = OTHER; note = 2'-O-methyluridine-3'-phosphate
  modified_base 13: mod_base = OTHER; note = 2'-O-methylguanosine-3'-phosphate
  modified_base 14: mod_base = OTHER; note = 2'-deoxy-2'-fluorouridine-3'-phosphate
  modified_base 15: mod_base = OTHER; note = 2'-O-methylcytidine-3'-phosphate
  modified_base 16: mod_base = OTHER; note = 2'-deoxy-2'-fluorocytidine-3'-phosphate
  modified_base 17: mod_base = OTHER; note = 2'-O-methyladenosine-3'-phosphate
  modified_base 18: mod_base = OTHER; note = 2'-O-methylguanosine-3'-phosphate
  modified_base 19: mod_base = OTHER; note = 2'-O-methylcytidine-3'-phosphate
  modified_base 20: mod_base = OTHER; note = 2'-O-methyluridine-3'-phosphate
  modified_base 21: mod_base = OTHER; note = 2'-O-methyluridine-3'-phosphorothioate
  modified_base 22: mod_base = OTHER; note = 2'-O-methyluridine-3'-phosphorothioate
  modified_base 23: mod_base = OTHER; note = 2'-O-methyladenosine
  misc_feature 1: note = RNA
  misc_feature 3..4: note = RNA
  misc_feature 6..23: note = RNA
  misc_feature 2: note = DNA
  misc_feature 5: note = DNA
aagcagcttcttgtccagcttta

SEQ ID NO: 898 - DNA, 23 bp, synthetic construct
  source 1..23: mol_type = other DNA
  modified_base 1: mod_base = OTHER; note = 2'-O-methyladenosine-3'-phosphorothioate
  modified_base 2: mod_base = OTHER; note = 2'-deoxyadenosine-3'-phosphorothioate
  modified_base 3: mod_base = OTHER; note = 2'-O-methylguanosine-3'-phosphate
  modified_base 4: mod_base = OTHER; note = 2'-O-methylcytidine-3'-phosphate
  modified_base 6: mod_base = OTHER; note = 2'-O-methylguanosine-3'-phosphate
  modified_base 7: mod_base = OTHER; note = Cytidine-glycol nucleic acid (GNA), S-isomer
  modified_base 8: mod_base = OTHER; note = 2'-O-methyluridine-3'-phosphate
  modified_base 9: mod_base = OTHER; note = 2'-O-methyluridine-3'-phosphate
  modified_base 10: mod_base = OTHER; note = 2'-O-methylcytidine-3'-phosphate
  modified_base 11: mod_base = OTHER; note = 2'-O-methyluridine-3'-phosphate
  modified_base 12: mod_base = OTHER; note = 2'-O-methyluridine-3'-phosphate
  modified_base 13: mod_base = OTHER; note = 2'-O-methylguanosine-3'-phosphate
  modified_base 14: mod_base = OTHER; note = 2'-deoxy-2'-fluorouridine-3'-phosphate
  modified_base 15: mod_base = OTHER; note = 2'-O-methylcytidine-3'-phosphate
  modified_base 16: mod_base = OTHER; note = 2'-deoxy-2'-fluorocytidine-3'-phosphate
  modified_base 17: mod_base = OTHER; note = 2'-O-methyladenosine-3'-phosphate
  modified_base 18: mod_base = OTHER; note = 2'-O-methylguanosine-3'-phosphate
  modified_base 19: mod_base = OTHER; note = 2'-O-methylcytidine-3'-phosphate
  modified_base 20: mod_base = OTHER; note = 2'-O-methyluridine-3'-phosphate
  modified_base 21: mod_base = OTHER; note = 2'-O-methyluridine-3'-phosphorothioate
  modified_base 22: mod_base = OTHER; note = 2'-O-methyluridine-3'-phosphorothioate
  modified_base 23: mod_base = OTHER; note = 2'-O-methylcytidine
  misc_feature 1: note = RNA
  misc_feature 3..4: note = RNA
  misc_feature 6..23: note = RNA
  misc_feature 2: note = DNA
  misc_feature 5: note = DNA
aagcagcttcttgtccagctttc

SEQ ID NO: 899 - DNA, 23 bp, synthetic construct
  source 1..23: mol_type = other DNA
  modified_base 1: mod_base = OTHER; note = 2'-O-methyladenosine-3'-phosphorothioate
  modified_base 2: mod_base = OTHER; note = 2'-deoxyadenosine-3'-phosphorothioate
  modified_base 3: mod_base = OTHER; note = 2'-O-methylguanosine-3'-phosphate
  modified_base 4: mod_base = OTHER; note = 2'-O-methylcytidine-3'-phosphate
  modified_base 6: mod_base = OTHER; note = 2'-O-methylguanosine-3'-phosphate
  modified_base 7: mod_base = OTHER; note = cytidine-2'-phosphate
  modified_base 8: mod_base = OTHER; note = 2'-O-methyluridine-3'-phosphate
  modified_base 9: mod_base = OTHER; note = 2'-O-methyluridine-3'-phosphate
  modified_base 10: mod_base = OTHER; note = 2'-O-methylcytidine-3'-phosphate
  modified_base 11: mod_base = OTHER; note = 2'-O-methyluridine-3'-phosphate
  modified_base 12: mod_base = OTHER; note = 2'-O-methyluridine-3'-phosphate
  modified_base 13: mod_base = OTHER; note = 2'-O-methylguanosine-3'-phosphate
  modified_base 14: mod_base = OTHER; note = 2'-deoxy-2'-fluorouridine-3'-phosphate
  modified_base 15: mod_base = OTHER; note = 2'-O-methylcytidine-3'-phosphate
  modified_base 16: mod_base = OTHER; note = 2'-deoxy-2'-fluorocytidine-3'-phosphate
  modified_base 17: mod_base = OTHER; note = 2'-O-methyladenosine-3'-phosphate
  modified_base 18: mod_base = OTHER; note = 2'-O-methylguanosine-3'-phosphate
  modified_base 19: mod_base = OTHER; note = 2'-O-methylcytidine-3'-phosphate
  modified_base 20: mod_base = OTHER; note = 2'-O-methyluridine-3'-phosphate
  modified_base 21: mod_base = OTHER; note = 2'-O-methyluridine-3'-phosphorothioate
  modified_base 22: mod_base = OTHER; note = 2'-O-methyluridine-3'-phosphorothioate
  modified_base 23: mod_base = OTHER; note = 2'-O-methylcytidine
  misc_feature 1: note = RNA
  misc_feature 3..4: note = RNA
  misc_feature 6..23: note = RNA
  misc_feature 2: note = DNA
  misc_feature 5: note = DNA
aagcagcttcttgtccagctttc

SEQ ID NO: 900 - DNA, 23 bp, synthetic construct
  source 1..23: mol_type = other DNA
  modified_base 1: mod_base = OTHER; note = 2'-O-methyladenosine-3'-phosphorothioate
  modified_base 2: mod_base = OTHER; note = 2'-deoxyadenosine-3'-phosphorothioate
  modified_base 3: mod_base = OTHER; note = 2'-O-methylguanosine-3'-phosphate
  modified_base 4: mod_base = OTHER; note = 2'-O-methylcytidine-3'-phosphate
  modified_base 6: mod_base = OTHER; note = 2'-O-methylguanosine-3'-phosphate
  modified_base 7: mod_base = OTHER; note = Cytidine-glycol nucleic acid (GNA), S-isomer
  modified_base 8: mod_base = OTHER; note = 2'-O-methyluridine-3'-phosphate
  modified_base 9: mod_base = OTHER; note = 2'-O-methyluridine-3'-phosphate
  modified_base 10: mod_base = OTHER; note = 2'-O-methylcytidine-3'-phosphate
  modified_base 11: mod_base = OTHER; note = 2'-O-methyluridine-3'-phosphate
  modified_base 12: mod_base = OTHER; note = 2'-O-methyluridine-3'-phosphate
  modified_base 13: mod_base = OTHER; note = 2'-O-methylguanosine-3'-phosphate
  modified_base 14: mod_base = OTHER; note = 2'-deoxy-2'-fluorouridine-3'-phosphate
  modified_base 15: mod_base = OTHER; note = 2'-O-methylcytidine-3'-phosphate
  modified_base 16: mod_base = OTHER; note = 2'-deoxy-2'-fluorocytidine-3'-phosphate
  modified_base 17: mod_base = OTHER; note = 2'-O-methyladenosine-3'-phosphate
  modified_base 18: mod_base = OTHER; note = 2'-O-methylguanosine-3'-phosphate
  modified_base 19: mod_base = OTHER; note = 2'-O-methylcytidine-3'-phosphate
  modified_base 20: mod_base = OTHER; note = 2'-O-methyluridine-3'-phosphate
  modified_base 21: mod_base = OTHER; note = 2'-O-methyluridine-3'-phosphorothioate
  modified_base 22: mod_base = OTHER; note = 2'-O-methylcytidine-3'-phosphorothioate
  modified_base 23: mod_base = OTHER; note = 2'-O-methylcytidine
  misc_feature 1: note = RNA
  misc_feature 3..4: note = RNA
  misc_feature 6..23: note = RNA
  misc_feature 2: note = DNA
  misc_feature 5: note = DNA
aagcagcttcttgtccagcttcc

SEQ ID NO: 901 - DNA, 23 bp, synthetic construct
  source 1..23: mol_type = other DNA
  modified_base 1: mod_base = OTHER; note = 2'-O-methyladenosine-3'-phosphorothioate
  modified_base 2: mod_base = OTHER; note = 2'-deoxyadenosine-3'-phosphorothioate
  modified_base 3: mod_base = OTHER; note = 2'-O-methylguanosine-3'-phosphate
  modified_base 4: mod_base = OTHER; note = 2'-O-methylcytidine-3'-phosphate
  modified_base 6: mod_base = OTHER; note = 2'-O-methylguanosine-3'-phosphate
  modified_base 7: mod_base = OTHER; note = cytidine-2'-phosphate
  modified_base 8: mod_base = OTHER; note = 2'-O-methyluridine-3'-phosphate
  modified_base 9: mod_base = OTHER; note = 2'-O-methyluridine-3'-phosphate
  modified_base 10: mod_base = OTHER; note = 2'-O-methylcytidine-3'-phosphate
  modified_base 11: mod_base = OTHER; note = 2'-O-methyluridine-3'-phosphate
  modified_base 12: mod_base = OTHER; note = 2'-O-methyluridine-3'-phosphate
  modified_base 13: mod_base = OTHER; note = 2'-O-methylguanosine-3'-phosphate
  modified_base 14: mod_base = OTHER; note = 2'-deoxy-2'-fluorouridine-3'-phosphate
  modified_base 15: mod_base = OTHER; note = 2'-O-methylcytidine-3'-phosphate
  modified_base 16: mod_base = OTHER; note = 2'-deoxy-2'-fluorocytidine-3'-phosphate
  modified_base 17: mod_base = OTHER; note = 2'-O-methyladenosine-3'-phosphate
  modified_base 18: mod_base = OTHER; note = 2'-O-methylguanosine-3'-phosphate
  modified_base 19: mod_base = OTHER; note = 2'-O-methylcytidine-3'-phosphate
  modified_base 20: mod_base = OTHER; note = 2'-O-methyluridine-3'-phosphate
  modified_base 21: mod_base = OTHER; note = 2'-O-methyluridine-3'-phosphorothioate
  modified_base 22: mod_base = OTHER; note = 2'-O-methylcytidine-3'-phosphorothioate
  modified_base 23: mod_base = OTHER; note = 2'-O-methylcytidine
  misc_feature 1: note = RNA
  misc_feature 3..4: note = RNA
  misc_feature 6..23: note = RNA
  misc_feature 2: note = DNA
  misc_feature 5: note = DNA
aagcagcttcttgtccagcttcc

SEQ ID NO: 902 - RNA, 19 nt, synthetic construct
  source 1..19: mol_type = other RNA
  modified_base 1: mod_base = OTHER; note = 2'-O-methylguanosine-3'-phosphorothioate
  modified_base 2: mod_base = OTHER; note = 2'-O-methylcytidine-3'-phosphorothioate
  modified_base 3: mod_base = OTHER; note = 2'-O-methyluridine-3'-phosphate
  modified_base 4: mod_base = OTHER; note = 2'-O-methylguanosine-3'-phosphate
  modified_base 5: mod_base = OTHER; note = 2'-deoxy-2'-fluoroguanosine-3'-phosphate
  modified_base 6: mod_base = OTHER; note = 2'-O-methyladenosine-3'-phosphate
  modified_base 7: mod_base = OTHER; note = 2'-deoxy-2'-fluorocytidine-3'-phosphate
  modified_base 8: mod_base = OTHER; note = 2'-deoxy-2'-fluoroadenosine-3'-phosphate
  modified_base 9: mod_base = OTHER; note = 2'-deoxy-2'-fluoroadenosine-3'-phosphate
  modified_base 10: mod_base = OTHER; note = 2'-O-methylguanosine-3'-phosphate
  modified_base 11: mod_base = OTHER; note = 2'-O-methyladenosine-3'-phosphate
  modified_base 12: mod_base = OTHER; note = 2'-O-methyladenosine-3'-phosphate
  modified_base 13: mod_base = OTHER; note = 2'-O-methylguanosine-3'-phosphate
  modified_base 14: mod_base = OTHER; note = 2'-O-methylcytidine-3'-phosphate
  modified_base 15: mod_base = OTHER; note = 2'-O-methyluridine-3'-phosphate
  modified_base 16: mod_base = OTHER; note = 2'-O-methylguanosine-3'-phosphate
  modified_base 17: mod_base = OTHER; note = 2'-O-methylcytidine-3'-phosphate
  modified_base 18: mod_base = OTHER; note = 2'-O-methyluridine-3'-phosphate
  modified_base 19: mod_base = OTHER; note = 2'-O-methyluridine-3'-phosphate ((2S,4R)-1-[29-[[2-(acetylamino)-2-deoxy-beta-D-galactopyra nosyl]oxy]-14,14-bis[[3-[[3-[[5-[[2-(acetylamino)-2-deoxy-b eta-D-galactopyranosyl]oxy]-1-oxopentyl]amino]propyl]amino] -3-oxopropoxy]methyl]-1,12,19,25-tetraoxo-16-oxa-13,20,24-t riazanonacos-1-yl]-4-hydroxy-2-pyrrolidinyl)methyl ester
gctggacaagaagctgctt

SEQ ID NO: 903 - DNA, 21 bp, synthetic construct
  source 1..21: mol_type = other DNA
  modified_base 1: mod_base = OTHER; note = 2'-O-methyladenosine-3'-phosphorothioate
  modified_base 2: mod_base = OTHER; note = 2'-deoxyadenosine-3'-phosphorothioate
  modified_base 3: mod_base = OTHER; note = 2'-O-methylguanosine-3'-phosphate
  modified_base 4: mod_base = OTHER; note = 2'-O-methylcytidine-3'-phosphate
  modified_base 6: mod_base = OTHER; note = 2'-O-methylguanosine-3'-phosphate
  modified_base 7: mod_base = OTHER; note = Cytidine-glycol nucleic acid (GNA), S-isomer
  modified_base 8: mod_base = OTHER; note = 2'-O-methyluridine-3'-phosphate
  modified_base 9: mod_base = OTHER; note = 2'-O-methyluridine-3'-phosphate
  modified_base 10: mod_base = OTHER; note = 2'-O-methylcytidine-3'-phosphate
  modified_base 11: mod_base = OTHER; note = 2'-O-methyluridine-3'-phosphate
  modified_base 12: mod_base = OTHER; note = 2'-O-methyluridine-3'-phosphate
  modified_base 13: mod_base = OTHER; note = 2'-O-methylguanosine-3'-phosphate
  modified_base 14: mod_base = OTHER; note = 2'-deoxy-2'-fluorouridine-3'-phosphate
  modified_base 15: mod_base = OTHER; note = 2'-O-methylcytidine-3'-phosphate
  modified_base 16: mod_base = OTHER; note = 2'-deoxy-2'-fluorocytidine-3'-phosphate
  modified_base 17: mod_base = OTHER; note = 2'-O-methyladenosine-3'-phosphate
  modified_base 18: mod_base = OTHER; note = 2'-O-methylguanosine-3'-phosphate
  modified_base 19: mod_base = OTHER; note = 2'-O-methylcytidine-3'-phosphorothioate
  modified_base 20: mod_base = OTHER; note = 2'-O-methyluridine-3'-phosphorothioate
  modified_base 21: mod_base = OTHER; note = 2'-O-methyluridine
  misc_feature 1: note = RNA
  misc_feature 3..4: note = RNA
  misc_feature 6..21: note = RNA
  misc_feature 2: note = DNA
  misc_feature 5: note = DNA
aagcagcttcttgtccagctt

SEQ ID NO: 904 - RNA, 21 nt, synthetic construct
  source 1..21: mol_type = other RNA
aagctggacaagaagctgcta

SEQ ID NO: 905 - DNA, 21 bp, synthetic construct
  source 1..21: mol_type = other DNA
  modified_base 1: mod_base = OTHER; note = 2'-O-methyladenosine-3'-phosphorothioate
  modified_base 2: mod_base = OTHER; note = 2'-deoxyadenosine-3'-phosphorothioate
  modified_base 3: mod_base = OTHER; note = 2'-O-methylguanosine-3'-phosphate
  modified_base 4: mod_base = OTHER; note = 2'-O-methylcytidine-3'-phosphate
  modified_base 6: mod_base = OTHER; note = 2'-O-methylguanosine-3'-phosphate
  modified_base 7: mod_base = OTHER; note = cytidine-2'-phosphate
  modified_base 8: mod_base = OTHER; note = 2'-O-methyluridine-3'-phosphate
  modified_base 9: mod_base = OTHER; note = 2'-O-methyluridine-3'-phosphate
  modified_base 10: mod_base = OTHER; note = 2'-O-methylcytidine-3'-phosphate
  modified_base 11: mod_base = OTHER; note = 2'-O-methyluridine-3'-phosphate
  modified_base 12: mod_base = OTHER; note = 2'-O-methyluridine-3'-phosphate
  modified_base 13: mod_base = OTHER; note = 2'-O-methylguanosine-3'-phosphate
  modified_base 14: mod_base = OTHER; note = 2'-deoxy-2'-fluorouridine-3'-phosphate
  modified_base 15: mod_base = OTHER; note = 2'-O-methylcytidine-3'-phosphate
  modified_base 16: mod_base = OTHER; note = 2'-deoxy-2'-fluorocytidine-3'-phosphate
  modified_base 17: mod_base = OTHER; note = 2'-O-methyladenosine-3'-phosphate
  modified_base 18: mod_base = OTHER; note = 2'-O-methylguanosine-3'-phosphate
  modified_base 19: mod_base = OTHER; note = 2'-O-methylcytidine-3'-phosphorothioate
  modified_base 20: mod_base = OTHER; note = 2'-O-methyluridine-3'-phosphorothioate
  modified_base 21: mod_base = OTHER; note = 2'-O-methyluridine
  misc_feature 1: note = RNA
  misc_feature 3..4: note = RNA
  misc_feature 6..21: note = RNA
  misc_feature 2: note = DNA
  misc_feature 5: note = DNA
aagcagcttcttgtccagctt

SEQ ID NO: 906 - DNA, 21 bp, synthetic construct
  source 1..21: mol_type = other DNA
  modified_base 1: mod_base = OTHER; note = 2'-O-methyladenosine-3'-phosphorothioate
  modified_base 2: mod_base = OTHER; note = 2'-O-methyladenosine-3'-phosphorothioate
  modified_base 3: mod_base = OTHER; note = 2'-O-methylguanosine-3'-phosphate
  modified_base 4: mod_base = OTHER; note = 2'-O-methylcytidine-3'-phosphate
  modified_base 5: mod_base = OTHER; note = 2'-O-methyluridine-3'-phosphate
  modified_base 6: mod_base = OTHER; note = 2'-O-methylguanosine-3'-phosphate
  modified_base 7: mod_base = OTHER; note = 2'-O-methylguanosine-3'-phosphate
  modified_base 8: mod_base = OTHER; note = 2'-O-methyladenosine-3'-phosphate
  modified_base 9: mod_base = OTHER; note = 2'-deoxy-2'-fluorocytidine-3'-phosphate
  modified_base 10: mod_base = OTHER; note = 2'-O-methyladenosine-3'-phosphate
  modified_base 12: mod_base = OTHER; note = 2'-O-methylguanosine-3'-phosphate
  modified_base 13: mod_base = OTHER; note = 2'-O-methyladenosine-3'-phosphate
  modified_base 14: mod_base = OTHER; note = 2'-O-methyladenosine-3'-phosphate
  modified_base 15: mod_base = OTHER; note = 2'-O-methylguanosine-3'-phosphate
  modified_base 16: mod_base = OTHER; note = 2'-O-methylcytidine-3'-phosphate
  modified_base 17: mod_base = OTHER; note = 2'-O-methyluridine-3'-phosphate
  modified_base 18: mod_base = OTHER; note = 2'-O-methylguanosine-3'-phosphate
  modified_base 19: mod_base = OTHER; note = 2'-O-methylcytidine-3'-phosphate
  modified_base 20: mod_base = OTHER; note = 2'-O-methyluridine-3'-phosphate
  modified_base 21: mod_base = OTHER; note = 2'-O-methyluridine-3'-phosphate ((2S,4R)-1-[29-[[2-(acetylamino)-2-deoxy-beta-D-galactopyra nosyl]oxy]-14,14-bis[[3-[[3-[[5-[[2-(acetylamino)-2-deoxy-b eta-D-galactopyranosyl]oxy]-1-oxopentyl]amino]propyl]amino] -3-oxopropoxy]methyl]-1,12,19,25-tetraoxo-16-oxa-13,20,24-t riazanonacos-1-yl]-4-hydroxy-2-pyrrolidinyl)methyl ester
  misc_feature 1..10: note = RNA
  misc_feature 12..21: note = RNA
  misc_feature 11: note = DNA
aagctggacaagaagctgctt

SEQ ID NO: 907 - DNA, 21 bp, synthetic construct
  source 1..21: mol_type = other DNA
  modified_base 1: mod_base = OTHER; note = 2'-O-methyladenosine-3'-phosphorothioate
  modified_base 2: mod_base = OTHER; note = 2'-O-methyladenosine-3'-phosphorothioate
  modified_base 3: mod_base = OTHER; note = 2'-O-methylguanosine-3'-phosphate
  modified_base 4: mod_base = OTHER; note = 2'-O-methylcytidine-3'-phosphate
  modified_base 5: mod_base = OTHER; note = 2'-O-methyluridine-3'-phosphate
  modified_base 6: mod_base = OTHER; note = 2'-O-methylguanosine-3'-phosphate
  modified_base 7: mod_base = OTHER; note = 2'-O-methylguanosine-3'-phosphate
  modified_base 8: mod_base = OTHER; note = 2'-O-methyladenosine-3'-phosphate
  modified_base 9: mod_base = OTHER; note = 2'-deoxy-2'-fluorocytidine-3'-phosphate
  modified_base 10: mod_base = OTHER; note = 2'-O-methyladenosine-3'-phosphate
  modified_base 12: mod_base = OTHER; note = 2'-O-methylguanosine-3'-phosphate
  modified_base 14: mod_base = OTHER; note = 2'-O-methyladenosine-3'-phosphate
  modified_base 15: mod_base = OTHER; note = 2'-O-methylguanosine-3'-phosphate
  modified_base 16: mod_base = OTHER; note = 2'-O-methylcytidine-3'-phosphate
  modified_base 17: mod_base = OTHER; note = 2'-O-methyluridine-3'-phosphate
  modified_base 18: mod_base = OTHER; note = 2'-O-methylguanosine-3'-phosphate
  modified_base 19: mod_base = OTHER; note = 2'-O-methylcytidine-3'-phosphate
  modified_base 20: mod_base = OTHER; note = 2'-O-methyluridine-3'-phosphate
  modified_base 21: mod_base = OTHER; note = 2'-O-methyluridine-3'-phosphate ((2S,4R)-1-[29-[[2-(acetylamino)-2-deoxy-beta-D-galactopyra nosyl]oxy]-14,14-bis[[3-[[3-[[5-[[2-(acetylamino)-2-deoxy-b eta-D-galactopyranosyl]oxy]-1-oxopentyl]amino]propyl]amino] -3-oxopropoxy]methyl]-1,12,19,25-tetraoxo-16-oxa-13,20,24-t riazanonacos-1-yl]-4-hydroxy-2-pyrrolidinyl)methyl ester
  misc_feature 1..10: note = RNA
  misc_feature 12: note = RNA
  misc_feature 14..21: note = RNA
  misc_feature 11: note = DNA
  misc_feature 13: note = DNA
aagctggacaagaagctgctt

SEQ ID NO: 908 - DNA, 21 bp, synthetic construct
  source 1..21: mol_type = other DNA
  modified_base 1: mod_base = OTHER; note = 2'-O-methyladenosine-3'-phosphorothioate
  modified_base 2: mod_base = OTHER; note = 2'-O-methyladenosine-3'-phosphorothioate
  modified_base 3: mod_base = OTHER; note = 2'-O-methylguanosine-3'-phosphate
  modified_base 4: mod_base = OTHER; note = 2'-O-methylcytidine-3'-phosphate
  modified_base 5: mod_base = OTHER; note = 2'-O-methyluridine-3'-phosphate
  modified_base 6: mod_base = OTHER; note = 2'-O-methylguanosine-3'-phosphate
  modified_base 7: mod_base = OTHER; note = 2'-O-methylguanosine-3'-phosphate
  modified_base 8: mod_base = OTHER; note = 2'-O-methyladenosine-3'-phosphate
  modified_base 9: mod_base = OTHER; note = 2'-deoxy-2'-fluorocytidine-3'-phosphate
  modified_base 10: mod_base = OTHER; note = 2'-O-methyladenosine-3'-phosphate
  modified_base 12: mod_base = OTHER; note = 2'-O-methylguanosine-3'-phosphate
  modified_base 13: mod_base = OTHER; note = 2'-O-methyladenosine-3'-phosphate
  modified_base 14: mod_base = OTHER; note = 2'-O-methyladenosine-3'-phosphate
  modified_base 15: mod_base = OTHER; note = 2'-O-methylguanosine-3'-phosphate
  modified_base 16: mod_base = OTHER; note = 2'-O-methylcytidine-3'-phosphate
  modified_base 17: mod_base = OTHER; note = 2'-O-methyluridine-3'-phosphate
  modified_base 18: mod_base = OTHER; note = 2'-O-methyladenosine-3'-phosphate
  modified_base 19: mod_base = OTHER; note = 2'-O-methylcytidine-3'-phosphate
  modified_base 20: mod_base = OTHER; note = 2'-O-methyluridine-3'-phosphate
  modified_base 21: mod_base = OTHER; note = 2'-O-methyluridine-3'-phosphate ((2S,4R)-1-[29-[[2-(acetylamino)-2-deoxy-beta-D-galactopyra nosyl]oxy]-14,14-bis[[3-[[3-[[5-[[2-(acetylamino)-2-deoxy-b eta-D-galactopyranosyl]oxy]-1-oxopentyl]amino]propyl]amino] -3-oxopropoxy]methyl]-1,12,19,25-tetraoxo-16-oxa-13,20,24-t riazanonacos-1-yl]-4-hydroxy-2-pyrrolidinyl)methyl ester
  misc_feature 1..10: note = RNA
  misc_feature 12..21: note = RNA
  misc_feature 11: note = DNA
aagctggacaagaagctactt

SEQ ID NO: 909 - DNA, 23 bp, synthetic construct
  source 1..23: mol_type = other DNA
  modified_base 1: mod_base = OTHER; note = 2'-O-methyladenosine-3'-phosphorothioate
  modified_base 2: mod_base = OTHER; note = 2'-deoxyadenosine-3'-phosphorothioate
  modified_base 3: mod_base = OTHER; note = 2'-O-methylguanosine-3'-phosphate
  modified_base 4: mod_base = OTHER; note = 2'-O-methyluridine-3'-phosphate
  modified_base 6: mod_base = OTHER; note = 2'-O-methylguanosine-3'-phosphate
  modified_base 7: mod_base = OTHER; note = cytidine-2'-phosphate
  modified_base 8: mod_base = OTHER; note = 2'-O-methyluridine-3'-phosphate
  modified_base 9: mod_base = OTHER; note = 2'-O-methyluridine-3'-phosphate
  modified_base 10: mod_base = OTHER; note = 2'-O-methylcytidine-3'-phosphate
  modified_base 11: mod_base = OTHER; note = 2'-O-methyluridine-3'-phosphate
  modified_base 12: mod_base = OTHER; note = 2'-O-methyluridine-3'-phosphate
  modified_base 13: mod_base = OTHER; note = 2'-O-methylguanosine-3'-phosphate
  modified_base 14: mod_base = OTHER; note = 2'-deoxy-2'-fluorouridine-3'-phosphate
  modified_base 15: mod_base = OTHER; note = 2'-O-methylcytidine-3'-phosphate
  modified_base 16: mod_base = OTHER; note = 2'-deoxy-2'-fluorocytidine-3'-phosphate
  modified_base 17: mod_base = OTHER; note = 2'-O-methyladenosine-3'-phosphate
  modified_base 18: mod_base = OTHER; note = 2'-O-methylguanosine-3'-phosphate
  modified_base 19: mod_base = OTHER; note = 2'-O-methylcytidine-3'-phosphate
  modified_base 20: mod_base = OTHER; note = 2'-O-methyluridine-3'-phosphate
  modified_base 21: mod_base = OTHER; note = 2'-O-methyluridine-3'-phosphorothioate
  modified_base 22: mod_base = OTHER; note = 2'-O-methylcytidine-3'-phosphorothioate
  modified_base 23: mod_base = OTHER; note = 2'-O-methylcytidine
  misc_feature 1: note = RNA
  misc_feature 3..4: note = RNA
  misc_feature 6..23: note = RNA
  misc_feature 2: note = DNA
  misc_feature 5: note = DNA
aagtagcttcttgtccagcttcc

SEQ ID NO: 910 - DNA, 21 bp, synthetic construct
  source 1..21: mol_type = other DNA
  modified_base 1: mod_base = OTHER; note = 2'-O-methyladenosine-3'-phosphorothioate
  modified_base 2: mod_base = OTHER; note = 2'-O-methyladenosine-3'-phosphorothioate
  modified_base 3: mod_base = OTHER; note = 2'-O-methylguanosine-3'-phosphate
  modified_base 4: mod_base = OTHER; note = 2'-O-methylcytidine-3'-phosphate
  modified_base 5: mod_base = OTHER; note = 2'-O-methyluridine-3'-phosphate
  modified_base 6: mod_base = OTHER; note = 2'-O-methylguanosine-3'-phosphate
  modified_base 7: mod_base = OTHER; note = 2'-O-methylguanosine-3'-phosphate
  modified_base 8: mod_base = OTHER; note = 2'-O-methyladenosine-3'-phosphate
  modified_base 9: mod_base = OTHER; note = 2'-deoxy-2'-fluorocytidine-3'-phosphate
  modified_base 10: mod_base = OTHER; note = 2'-O-methyladenosine-3'-phosphate
  modified_base 12: mod_base = OTHER; note = 2'-O-methylguanosine-3'-phosphate
  modified_base 13: mod_base = OTHER; note = 2'-O-methyladenosine-3'-phosphate
  modified_base 14: mod_base = OTHER; note = 2'-O-methyladenosine-3'-phosphate
  modified_base 15: mod_base = OTHER; note = 2'-O-methylguanosine-3'-phosphate
  modified_base 16: mod_base = OTHER; note = 2'-O-methyluridine-3'-phosphate
  modified_base 17: mod_base = OTHER; note = 2'-O-methyluridine-3'-phosphate
  modified_base 18: mod_base = OTHER; note = 2'-O-methylguanosine-3'-phosphate
  modified_base 19: mod_base = OTHER; note = 2'-O-methylcytidine-3'-phosphate
  modified_base 20: mod_base = OTHER; note = 2'-O-methyluridine-3'-phosphate
  modified_base 21: mod_base = OTHER; note = 2'-O-methyluridine-3'-phosphate ((2S,4R)-1-[29-[[2-(acetylamino)-2-deoxy-beta-D-galactopyra nosyl]oxy]-14,14-bis[[3-[[3-[[5-[[2-(acetylamino)-2-deoxy-b eta-D-galactopyranosyl]oxy]-1-oxopentyl]amino]propyl]amino] -3-oxopropoxy]methyl]-1,12,19,25-tetraoxo-16-oxa-13,20,24-t riazanonacos-1-yl]-4-hydroxy-2-pyrrolidinyl)methyl ester
  misc_feature 1..10: note = RNA
  misc_feature 12..21: note = RNA
  misc_feature 11: note = DNA
aagctggacaagaagttgctt

SEQ ID NO: 911 - DNA, 23 bp, synthetic construct
  source 1..23: mol_type = other DNA
  modified_base 1: mod_base = OTHER; note = 2'-O-methyladenosine-3'-phosphorothioate
  modified_base 2: mod_base = OTHER; note = 2'-deoxyadenosine-3'-phosphorothioate
  modified_base 3: mod_base = OTHER; note = 2'-O-methylguanosine-3'-phosphate
  modified_base 4: mod_base = OTHER; note = 2'-O-methylcytidine-3'-phosphate
  modified_base 6: mod_base = OTHER; note = 2'-O-methyladenosine-3'-phosphate
  modified_base 7: mod_base = OTHER; note = cytidine-2'-phosphate
  modified_base 8: mod_base = OTHER; note = 2'-O-methyluridine-3'-phosphate
  modified_base 9: mod_base = OTHER; note = 2'-O-methyluridine-3'-phosphate
  modified_base 10: mod_base = OTHER; note = 2'-O-methylcytidine-3'-phosphate
  modified_base 11: mod_base = OTHER; note = 2'-O-methyluridine-3'-phosphate
  modified_base 12: mod_base = OTHER; note = 2'-O-methyluridine-3'-phosphate
  modified_base 13: mod_base = OTHER; note = 2'-O-methylguanosine-3'-phosphate
  modified_base 14: mod_base = OTHER; note = 2'-deoxy-2'-fluorouridine-3'-phosphate
  modified_base 15: mod_base = OTHER; note = 2'-O-methylcytidine-3'-phosphate
  modified_base 16: mod_base = OTHER; note = 2'-deoxy-2'-fluorocytidine-3'-phosphate
  modified_base 17: mod_base = OTHER; note = 2'-O-methyladenosine-3'-phosphate
  modified_base 18: mod_base = OTHER; note = 2'-O-methylguanosine-3'-phosphate
  modified_base 19: mod_base = OTHER; note = 2'-O-methylcytidine-3'-phosphate
  modified_base 20: mod_base = OTHER; note = 2'-O-methyluridine-3'-phosphate
  modified_base 21: mod_base = OTHER; note = 2'-O-methyluridine-3'-phosphorothioate
  modified_base 22: mod_base = OTHER; note = 2'-O-methylcytidine-3'-phosphorothioate
  modified_base 23: mod_base = OTHER; note = 2'-O-methylcytidine
  misc_feature 1: note = RNA
  misc_feature 3..4: note = RNA
  misc_feature 6..23: note = RNA
  misc_feature 2: note = DNA
  misc_feature 5: note = DNA
aagcaacttcttgtccagcttcc

SEQ ID NO: 912 - RNA, 21 nt, synthetic construct
  source 1..21: mol_type = other RNA
  modified_base 1: mod_base = OTHER; note = 2'-O-methyladenosine-3'-phosphorothioate
  modified_base 2: mod_base = OTHER; note = 2'-O-methyladenosine-3'-phosphorothioate
  modified_base 3: mod_base = OTHER; note = 2'-O-methylguanosine-3'-phosphate
  modified_base 4: mod_base = OTHER; note = 2'-O-methylcytidine-3'-phosphate
  modified_base 5: mod_base = OTHER; note = 2'-O-methyluridine-3'-phosphate
  modified_base 6: mod_base = OTHER; note = 2'-O-methylguanosine-3'-phosphate
  modified_base 7: mod_base = OTHER; note = 2'-O-methylguanosine-3'-phosphate
  modified_base 8: mod_base = OTHER; note = 2'-O-methyladenosine-3'-phosphate
  modified_base 9: mod_base = OTHER; note = 2'-deoxy-2'-fluorocytidine-3'-phosphate
  modified_base 10: mod_base = OTHER; note = 2'-deoxy-2'-fluoroadenosine-3'-phosphate
  modified_base 11: mod_base = OTHER; note = 2'-deoxy-2'-fluoroadenosine-3'-phosphate
  modified_base 12: mod_base = OTHER; note = 2'-O-methylguanosine-3'-phosphate
  modified_base 13: mod_base = OTHER; note = 2'-O-methyladenosine-3'-phosphate
  modified_base 14: mod_base = OTHER; note = 2'-O-methyladenosine-3'-phosphate
  modified_base 15: mod_base = OTHER; note = 2'-O-methylguanosine-3'-phosphate
  modified_base 16: mod_base = OTHER; note = 2'-O-methylcytidine-3'-phosphate
  modified_base 17: mod_base = OTHER; note = 2'-O-methyluridine-3'-phosphate
  modified_base 18: mod_base = OTHER; note = 2'-O-methylguanosine-3'-phosphate
  modified_base 19: mod_base = OTHER; note = 2'-O-methylcytidine-3'-phosphate
  modified_base 20: mod_base = OTHER; note = 2'-O-methyluridine-3'-phosphate
  modified_base 21: mod_base = OTHER; note = 2'-O-methyluridine-3'-phosphate ((2S,4R)-1-[29-[[2-(acetylamino)-2-deoxy-beta-D-galactopyra nosyl]oxy]-14,14-bis[[3-[[3-[[5-[[2-(acetylamino)-2-deoxy-b eta-D-galactopyranosyl]oxy]-1-oxopentyl]amino]propyl]amino] -3-oxopropoxy]methyl]-1,12,19,25-tetraoxo-16-oxa-13,20,24-t riazanonacos-1-yl]-4-hydroxy-2-pyrrolidinyl)methyl ester
aagctggacaagaagctgctt

SEQ ID NO: 913 - RNA, 19 nt, synthetic construct
  source 1..19: mol_type = other RNA
  modified_base 1: mod_base = OTHER; note = 2'-O-methylguanosine-3'-phosphorothioate
  modified_base 2: mod_base = OTHER; note = 2'-O-methylcytidine-3'-phosphorothioate
  modified_base 3: mod_base = OTHER; note = 2'-O-methyluridine-3'-phosphate
  modified_base 4: mod_base = OTHER; note = 2'-O-methylguanosine-3'-phosphate
  modified_base 5: mod_base = OTHER; note = 2'-O-methylguanosine-3'-phosphate
  modified_base 6: mod_base = OTHER; note = 2'-O-methyladenosine-3'-phosphate
  modified_base 7: mod_base = OTHER; note = 2'-deoxy-2'-fluorocytidine-3'-phosphate
  modified_base 8: mod_base = OTHER; note = 2'-deoxy-2'-fluoroadenosine-3'-phosphate
  modified_base 9: mod_base = OTHER; note = 2'-deoxy-2'-fluoroadenosine-3'-phosphate
  modified_base 10: mod_base = OTHER; note = 2'-O-methylguanosine-3'-phosphate
  modified_base 11: mod_base = OTHER; note = 2'-O-methyladenosine-3'-phosphate
  modified_base 12: mod_base = OTHER; note = 2'-O-methyladenosine-3'-phosphate
  modified_base 13: mod_base = OTHER; note = 2'-O-methylguanosine-3'-phosphate
  modified_base 14: mod_base = OTHER; note = 2'-O-methylcytidine-3'-phosphate
  modified_base 15: mod_base = OTHER; note = 2'-O-methyluridine-3'-phosphate
  modified_base 16: mod_base = OTHER; note = 2'-O-methylguanosine-3'-phosphate
  modified_base 17: mod_base = OTHER; note = 2'-O-methylcytidine-3'-phosphate
  modified_base 18: mod_base = OTHER; note = 2'-O-methyluridine-3'-phosphate
  modified_base 19: mod_base = OTHER; note = 2'-O-methyluridine-3'-phosphate ((2S,4R)-1-[29-[[2-(acetylamino)-2-deoxy-beta-D-galactopyra nosyl]oxy]-14,14-bis[[3-[[3-[[5-[[2-(acetylamino)-2-deoxy-b eta-D-galactopyranosyl]oxy]-1-oxopentyl]amino]propyl]amino] -3-oxopropoxy]methyl]-1,12,19,25-tetraoxo-16-oxa-13,20,24-t riazanonacos-1-yl]-4-hydroxy-2-pyrrolidinyl)methyl ester
gctggacaagaagctgctt

SEQ ID NO: 914 - RNA, 22 nt, synthetic construct
  source 1..22: mol_type = other RNA
  modified_base 1: mod_base = OTHER; note = 2'-O-methyladenosine-3'-phosphorothioate 2-hydroxymethyltetrahydrofuran-3-yl ester
  modified_base 2: mod_base = OTHER; note = 2'-O-methyladenosine-3'-phosphate
  modified_base 3: mod_base = OTHER; note = 2'-O-methylcytidine-3'-phosphate
  modified_base 4: mod_base = OTHER; note = 2'-O-methylguanosine-3'-phosphate
  modified_base 5: mod_base = OTHER; note = 2'-O-methylguanosine-3'-phosphate
  modified_base 6: mod_base = OTHER; note = 2'-O-methylguanosine-3'-phosphate
  modified_base 7: mod_base = OTHER; note = 2'-O-methyladenosine-3'-phosphate
  modified_base 8: mod_base = OTHER; note = 2'-O-methylcytidine-3'-phosphate
  modified_base 9: mod_base = OTHER; note = 2'-O-methyladenosine-3'-phosphate
  modified_base 10: mod_base = OTHER; note = 2'-deoxy-2'-fluoroguanosine-3'-phosphate
  modified_base 11: mod_base = OTHER; note = 2'-deoxy-2'-fluorouridine-3'-phosphate
  modified_base 12: mod_base = OTHER; note = 2'-deoxy-2'-fluoroadenosine-3'-phosphate
  modified_base 13: mod_base = OTHER; note = 2'-O-methyluridine-3'-phosphate
  modified_base 14: mod_base = OTHER; note = 2'-O-methyluridine-3'-phosphate
  modified_base 15: mod_base = OTHER; note = 2'-O-methylcytidine-3'-phosphate
  modified_base 16: mod_base = OTHER; note = 2'-O-methyluridine-3'-phosphate
  modified_base 17: mod_base = OTHER; note = 2'-O-methylcytidine-3'-phosphate
  modified_base 18: mod_base = OTHER; note = 2'-O-methyladenosine-3'-phosphate
  modified_base 19: mod_base = OTHER; note = 2'-O-methylguanosine-3'-phosphate
  modified_base 20: mod_base = OTHER; note = 2'-O-methyluridine-3'-phosphate
  modified_base 21: mod_base = OTHER; note = 2'-O-methylinosine-3'-phosphate
  modified_base 22: mod_base = OTHER; note = 2'-O-methyladenosine-3'-phosphorothioate 2-hydroxymethyltetrahydrofuran-3-yl ester
sacgggacagtattctcagtna

SEQ ID NO: 915 - RNA, 21 nt, synthetic construct
  source 1..21: mol_type = other RNA
  modified_base 1: mod_base = OTHER; note = 2'-O-methyluridine-3'-phosphorothioate
  modified_base 2: mod_base = OTHER; note = 2'-deoxy-2'-fluorocytidine-3'-phosphorothioate
  modified_base 3: mod_base = OTHER; note = 2'-O-methyladenosine-3'-phosphorothioate
  modified_base 4: mod_base = OTHER; note = 2'-deoxy-2'-fluorocytidine-3'-phosphate
  modified_base 5: mod_base = OTHER; note = 2'-O-methyluridine-3'-phosphate
  modified_base 6: mod_base = OTHER; note = 2'-deoxy-2'-fluoroguanosine-3'-phosphate
  modified_base 7: mod_base = OTHER; note = 2'-O-methyladenosine-3'-phosphate
  modified_base 8: mod_base = OTHER; note = 2'-O-methylguanosine-3'-phosphate
  modified_base 9: mod_base = OTHER; note = 2'-O-methyladenosine-3'-phosphate
  modified_base 10: mod_base = OTHER; note = 2'-O-methyladenosine-3'-phosphate
  modified_base 11: mod_base = OTHER; note = 2'-O-methyluridine-3'-phosphate
  modified_base 12: mod_base = OTHER; note = 2'-deoxy-2'-fluoroadenosine-3'-phosphate
  modified_base 13: mod_base = OTHER; note = 2'-O-methylcytidine-3'-phosphate
  modified_base 14: mod_base = OTHER; note = 2'-deoxy-2'-fluorouridine-3'-phosphate
  modified_base 15: mod_base = OTHER; note = 2'-O-methylguanosine-3'-phosphate
  modified_base 16: mod_base = OTHER; note = 2'-deoxy-2'-fluorouridine-3'-phosphate
  modified_base 17: mod_base = OTHER; note = 2'-O-methylcytidine-3'-phosphate
  modified_base 18: mod_base = OTHER; note = 2'-deoxy-2'-fluorocytidine-3'-phosphate
  modified_base 19: mod_base = OTHER; note = 2'-O-methylcytidine-3'-phosphate
  modified_base 20: mod_base = OTHER; note = 2'-deoxy-2'-fluoroguanosine-3'-phosphorothioate
  modified_base 21: mod_base = OTHER; note = 2'-O-methyluridine
tcactgagaatactgtcccgt

SEQ ID NO: 916 - RNA, 21 nt, synthetic construct
  source 1..21: mol_type = other RNA
aagggacagtattctcagtgc
